(19) United States
(12) Patent Application Publication
(10) Pub. No.: US 2022/0228178 A1
(43) Pub. Date: Jul. 21, 2022

(54) GENETICALLY MODIFIED MICROORGANISM FOR PRODUCING 3-HYDROXYHEXANEDIOIC ACID, (E)-HEX-2-ENEDIOIC ACID AND/OR HEXANEDIOIC ACID, AND PRODUCTION METHOD FOR SAID CHEMICALS

(71) Applicant: TORAY INDUSTRIES, INC., Tokyo (JP)

(72) Inventors: Kyohei ISOBE, Kamakura-shi (JP); Kenji KAWAMURA, Kamakura-shi (JP); Katsushige YAMADA, Kamakura-shi (JP)

(73) Assignee: TORAY INDUSTRIES, INC., Tokyo (JP)

(21) Appl. No.: 17/609,841

(22) PCT Filed: May 8, 2020
(86) PCT No.: PCT/JP2020/018665

§ 371 Date: Nov. 9, 2021

(30) Foreign Application Priority Data
May 10, 2019 (JP) 2019-089771

(51) Int. Cl. C12P 7/42; C12N 5/10

(52) U.S. Cl. CPC C12P 7/42; C12N 5/10

(57) ABSTRACT

Disclosed are a genetically modified microorganism with an ability to produce 3-hydroxyadipic acid, α-hydromuconic acid, and/or adipic acid in high yield, and a method of producing 3-hydroxyadipic acid, α-hydromuconic acid, and/or adipic acid by using the genetically modified microorganism. The genetically modified microorganism has an ability to produce 3-hydroxyadipic acid, α-hydromuconic acid, and/or adipic acid and is deficient in the function of pyruvate kinase, in which the activities of phosphoenolpyruvate carboxykinase and of an enzyme that catalyzes the reaction of reducing 3-oxoadipyl-CoA to 3-hydroxyadipyl-CoA are enhanced.

### TECHNICAL FIELD

[0001] The present invention relates to a genetically modified microorganism able to produce 3-hydroxyadipic acid, α-hydromuconic acid, and/or adipic acid in high yield and to a method of producing 3-hydroxyadipic acid, α-hydromuconic acid, and/or adipic acid by using the genetically modified microorganism.

### BACKGROUND ART

[0002] 3-Hydroxyadipic acid (IUPAC name: 3-hydroxyhexanedioic acid) and α-hydromuconic acid (IUPAC name: (E)-hex-2-enedioic acid) are dicarboxylic acids containing six carbon atoms. These dicarboxylic acids can be polymerized with a polyhydric alcohol or a polyfunctional amine, to be used as raw materials for the production of polyesters or polyamides, respectively. Additionally, these dicarboxylic acids can be used alone after ammonia addition at a terminal position in these chemicals to form lactams as raw materials for the production of polyamides.

[0003] The following documents related to the production of 3-hydroxyadipic acid or α-hydromuconic acid using a microorganism are known.

[0004] Patent Document 1 describes a method of producing 1,3-butadiene by using a microorganism in which a relevant metabolic pathway is modified, wherein 3-hydroxyadipic acid (3-hydroxyadipate) is described to be a metabolic intermediate in the metabolic pathway for biosynthesis of 1,3-butadiene from acetyl-CoA and succinyl-CoA.

[0005] Patent Document 2 describes a method of producing muconic acid by using a microorganism in which a relevant metabolic pathway is modified, wherein α-hydromuconic acid (2,3-dehydroadipate) is described to be a metabolic intermediate in the metabolic pathway for biosynthesis of trans,trans-muconic acid from acetyl-CoA and succinyl-CoA.

[0006] Patent Documents 3 and 4 describe a method of producing adipic acid and hexamethylene diamine (HMDA) by using a non-natural microorganism, wherein the biosynthetic pathways for these substances are described to share a common reaction to synthesize 3-oxoadipyl-CoA from acetyl-CoA and succinyl-CoA but diverge after the synthesis of 3-oxoadipyl-CoA. Furthermore, Patent Document 3 describes the pyruvate kinase gene as a candidate gene that is additionally deleted to improve the HMDA formation coupled with proliferation for the HMDA production, but a potential relationship between pyruvate kinase deficiency and increased adipic acid production is not mentioned in this document.

[0007] Additionally, all the biosynthetic pathways mentioned in Patent Documents 1 to 4 are described to share a common enzymatic reaction that reduces 3-oxoadipyl-CoA to 3-hydroxyadipyl-CoA.

[0008] Patent Documents 5 and 6 describe methods of producing 3-hydroxyadipic acid and α-hydromuconic acid by using a microorganism of the genus Serratia, respectively. The patent documents disclose that the efficiency of producing 3-hydroxyadipic acid and α-hydromuconic acid can be increased particularly by enhancing the activity of an acyl transferase that catalyzes a reaction to produce 3-oxoadipyl-CoA from acetyl-CoA and succinyl-CoA, but these documents have no description related to pyruvate kinase.

[0009] Moreover, a method of modifying a microorganism based on an in silico analysis is disclosed in Patent Document 7, in which the production of succinic acid is increased by deleting genes encoding pyruvate kinase and a phosphotransferase system enzyme in Escherichia coli (E. coli), pykF, pykA, and ptsG, and culturing the resulting E. coli bacteria under anaerobic conditions.

### PRIOR ART DOCUMENTS

### Patent Documents

[0010] Patent Document 1: JP 2013-535203 A

[0011] Patent Document 2: US 2011/0124911 A1

[0012] Patent Document 3: JP 2015-146810 A

[0013] Patent Document 4: JP 2011-515111 A

[0014] Patent Document 5: WO 2017/209102

[0015] Patent Document 6: WO 2017/209103

[0016] Patent Document 7: JP 2008-527991 A

### SUMMARY OF THE INVENTION

### Problems to be Solved by the Invention

[0017] Patent Documents 1 and 2 describe metabolic pathways by which the microorganisms can produce 3-hydroxyadipic acid and α-hydromuconic acid, but have no description about interruption of the metabolic pathways to allow the microorganisms to secrete 3-hydroxyadipic acid or α-hydromuconic acid into culture medium. Moreover, the prior studies described in Patent Documents 1 to 4 have not examined whether or not 3-hydroxyadipic acid or α-hydromuconic acid can be actually produced by using a microorganism in which a relevant metabolic pathway is modified by introducing a nucleic acid encoding an enzyme that catalyzes a reaction to reduce 3-oxoadipyl-CoA to 3-hydroxyadipyl-CoA. Patent Documents 3 to 6 disclose enhancement of gene expression of enzymes involved in increased production of 3-hydroxyadipic acid, α-hydromuconic acid, or adipic acid but have no description about enhancement of any enzymatic activity in the metabolic pathways upstream of acetyl-CoA and succinyl-CoA, wherein all the enzyme genes whose expression is increased are limited only to reactions downstream of acetyl-CoA and succinyl-CoA in the biosynthetic pathways.

[0018] Accordingly, an object of the present invention is to provide a genetically modified microorganism for producing 3-hydroxyadipic acid, α-hydromuconic acid, and/or adipic acid in high yield and a method of producing a substance by using the modified microorganism, wherein the modified microorganism is based on a genetically modified microorganism in which a nucleic acid encoding an enzyme that exhibits excellent activity in 3-oxoadipyl-CoA reduction reaction is introduced or the expression of the enzyme is enhanced to increase the activity of the enzyme, and wherein the modified microorganism is further modified to have an altered upstream metabolic pathway.

### Means for Solving the Problem

[0019] The inventors intensively studied in order to achieve the above-described object and consequently found that a genetically modified microorganism having an ability to produce 3-hydroxyadipic acid, α-hydromuconic acid, and/or adipic acid, having impaired pyruvate kinase function, and having enhanced activities of phosphoenolpyruvate carboxykinase and of an enzyme that catalyzes the reaction of reducing 3-oxoadipyl-CoA to 3-hydroxyadipyl-CoA has an excellent ability to produce 3-hydroxyadipic acid, α-hydromuconic acid, and/or adipic acid, to complete the present invention.

[0020] That is, the present invention provides the following:

(1) A genetically modified microorganism with an ability to produce 3-hydroxyadipic acid, α-hydromuconic acid, and/or adipic acid, in which the function of pyruvate kinase is impaired and the activities of phosphoenolpyruvate carboxykinase and of an enzyme that catalyzes a reaction to reduce 3-oxoadipyl-CoA to 3-hydroxyadipyl-CoA are enhanced.
(2) The genetically modified microorganism according to (1), wherein the function of a phosphotransferase system enzyme is further impaired.
(3) The genetically modified microorganism according to (1) or (2), wherein the enzyme that catalyzes a reaction to reduce 3-oxoadipyl-CoA to 3-hydroxyadipyl-CoA is any one of the following polypeptides (a) to (c):

[0021] (a) a polypeptide composed of an amino acid sequence represented by any one of SEQ ID NOs: 1 to 7;

[0022] (b) a polypeptide composed of the same amino acid sequence as that represented by any one of SEQ ID NOs: 1 to 7, except that one or several amino acids are substituted, deleted, inserted, and/or added, and having an enzymatic activity that catalyzes a reaction to reduce 3-oxoadipyl-CoA to 3-hydroxyadipyl-CoA;

[0023] (c) a polypeptide composed of an amino acid sequence with a sequence identity of not less than 70% to the sequence represented by any one of SEQ ID NOs: 1 to 7 and having an enzymatic activity that catalyzes a reaction to reduce 3-oxoadipyl-CoA to 3-hydroxyadipyl-CoA.

(4) A method of producing 3-hydroxyadipic acid, α-hydromuconic acid, and/or adipic acid, comprising the step of culturing the genetically modified microorganism according to any one of (1) to (3).

### Effects of the Invention

[0024] A genetically modified microorganism with an ability to produce 3-hydroxyadipic acid, α-hydromuconic acid, and/or adipic acid and with impaired pyruvate kinase function and with enhanced activities of phosphoenolpyruvate carboxykinase and of an enzyme that catalyzes the reaction of reducing 3-oxoadipyl-CoA to 3-hydroxyadipyl-CoA can produce 3-hydroxyadipic acid, α-hydromuconic acid, and/or adipic acid in high yield compared to a parental strain of the microorganism in which the genes encoding those enzymes are unaltered.

### DETAILED DESCRIPTION OF THE INVENTION

[0025] In the context of this invention, the inventors have found that 3-hydroxyadipic acid, α-hydromuconic acid, and/or adipic acid can be produced in high yield in a microorganism that originally has an ability to produce 3-hydroxyadipic acid, α-hydromuconic acid, and/or adipic acid by impairing the function of pyruvate kinase and enhancing the activities of phosphoenolpyruvate carboxykinase and of an enzyme that catalyzes the reaction of reducing 3-oxoadipyl-CoA to 3-hydroxyadipyl-CoA in the microorganism.

[0026] An enzyme that catalyzes the reaction of reducing 3-oxoadipyl-CoA to 3-hydroxyadipyl-CoA is hereinafter also referred to as “3-oxoadipyl-CoA reductase” in this specification. Additionally, phosphoenolpyruvic acid may be abbreviated as PEP, 3-hydroxyadipic acid may be abbreviated as 3HA, α-hydromuconic acid may be abbreviated as HMA, and adipic acid may be abbreviated as ADA, respectively, in this specification.

[0027] In the present invention, examples of enhancing the activities of phosphoenolpyruvate carboxykinase and of an enzyme that catalyzes the reaction of reducing 3-oxoadipyl-CoA to 3-hydroxyadipyl-CoA include a method in which nucleic acids encoding these polypeptides are introduced from the outside to the inside of a host microorganism; a method in which the copy numbers of nucleic acids encoding the polypeptides are increased; and a method in which a promoter region or a ribosome-binding sequence upstream of the region coding for each of the polypeptides is modified. These methods may be carried out individually or in combination. The method of introduction of a nucleic acid is not limited to a particular method, and examples of the method that can be used include a method in which a nucleic acid of interest is integrated into an expression vector capable of autonomous replication in a microorganism and then integrated into a host microorganism, and a method in which a nucleic acid of interest is integrated into the genome of a microorganism.

[0028] One or more of the above nucleic acids may be introduced. Moreover, the introduction of a nucleic acid and the enhancement of polypeptide expression may be combined.

[0029] When a nucleic acid encoding a polypeptide expressed in the present invention is integrated into an expression vector or the genome of a host microorganism, the nucleic acid to be integrated into the expression vector or the genome is preferably composed of a promoter, a ribosome-binding sequence, a nucleic acid encoding the polypeptide to be expressed, and a transcription termination sequence, and may additionally contain a gene that controls the activity of the promoter.

[0030] The promoter used in the present invention is not limited to a particular promoter, as long as the promoter drives expression of the enzyme in the host microorganism; examples of the promoter include gap promoter, trp promoter, lac promoter, tac promoter, and T7 promoter.

[0031] In cases where an expression vector is used in the present invention to introduce the nucleic acid or to enhance the expression of the polypeptide, the expression vector is not limited to a particular vector, as long as the vector is capable of autonomous replication in the microorganism; examples of the vector include pBBR1MCS vector, pBR322 vector, pMW vector, pET vector, pRSF vector, pCDF vector, pACYC vector, and derivatives of the above vectors.

[0032] In cases where a nucleic acid for genome integration is used in the present invention to introduce the nucleic acid or to enhance the expression of the polypeptide, the nucleic acid for genome integration is introduced by site-specific homologous recombination. The method for site-specific homologous recombination is not limited to a particular method, and examples of the method include a method in which λ Red recombinase and FLP recombinase are used (Proc Natl Acad Sci U.S.A. 2000 Jun. 6; 97 (12): 6640-6645.), and a method in which λ Red recombinase and the sacB gene are used (Biosci Biotechnol Biochem. 2007 December; 71 (12):2905-11.).

[0033] The method of introducing the expression vector or the nucleic acid for genome integration is not limited to a particular method, as long as the method is for introduction of a nucleic acid into a microorganism; examples of the method include the calcium ion method (Journal of Molecular Biology, 53, 159 (1970)), and electroporation (NM Calvin, PC Hanawalt. J. Bacteriol, 170 (1988), pp. 2796-2801).

[0034] The scheme 1 below shows an exemplary reaction pathway required for the production of 3-hydroxyadipic acid, α-hydromuconic acid, and/or adipic acid. In this scheme, the reaction A represents a reaction that generates 3-oxoadipyl-CoA and coenzyme A from acetyl-CoA and succinyl-CoA. The reaction B represents a reaction that reduces 3-oxoadipyl-CoA to 3-hydroxyadipyl-CoA. The reaction C represents a reaction that generates 2,3-dehydroadipyl-CoA from 3-hydroxyadipyl-CoA. The reaction D represents a reaction that generates adipyl-CoA from 2,3-dehydroadipyl-CoA. The reaction E represents a reaction that generates 3-hydroxyadipic acid from 3-hydroxyadipyl-CoA. The reaction F represents a reaction that generates α-hydromuconic acid from 2,3-dehydroadipyl-CoA. The reaction G represents a reaction that generates adipic acid from adipyl-CoA.

[chemical structure]

[0035] In cases where a microorganism has an ability to produce 3-hydroxyadipic acid, α-hydromuconic acid, and/or adipic acid, such a microorganism is known to have an enzyme that catalyzes at least the reaction A in a biosynthetic pathway shown in the above scheme 1. Preferably, reactions to generate 3-hydroxyadipic acid, α-hydromuconic acid, or adipic acid from 3-oxoadipyl-CoA are involved in the biosynthetic pathway shown in the scheme 1. That is, in cases where a genetically modified microorganism according to the present invention has an ability to produce 3-hydroxyadipic acid, a host microorganism used for the generation of the genetically modified microorganism preferably has an ability to generate 3-oxoadipyl-CoA and coenzyme A from acetyl-CoA and succinyl-CoA (the reaction A), an ability to reduce 3-oxoadipyl-CoA to 3-hydroxyadipyl-CoA (the reaction B), and an ability to generate 3-hydroxyadipic acid from 3-hydroxyadipyl-CoA (the reaction E). Moreover, in cases where a genetically modified microorganism according to the present invention has an ability to produce α-hydromuconic acid, a host microorganism used for the generation of the genetically modified microorganism preferably has an ability to generate 3-oxoadipyl-CoA and coenzyme A from acetyl-CoA and succinyl-CoA (the reaction A), an ability to reduce 3-oxoadipyl-CoA to 3-hydroxyadipyl-CoA (the reaction B), an ability to generate 2,3-dehydroadipyl-CoA from 3-hydroxyadipyl-CoA (the reaction C), and an ability to generate α-hydromuconic acid from 2,3-dehydroadipyl-CoA (the reaction F). Furthermore, in cases where a genetically modified microorganism according to the present invention has an ability to produce adipic acid, a host microorganism used for the generation of the genetically modified microorganism preferably has an ability to generate 3-oxoadipyl-CoA and coenzyme A from acetyl-CoA and succinyl-CoA (the reaction A), an ability to reduce 3-oxoadipyl-CoA to 3-hydroxyadipyl-CoA (the reaction B), an ability to generate 2,3-dehydroadipyl-CoA from 3-hydroxyadipyl-CoA (the reaction C), an ability to generate adipyl-CoA from 2,3-dehydroadipyl-CoA (the reaction D), and an ability to generate adipic acid from adipyl-CoA (the reaction G).

[0036] A genetically modified microorganism that can produce 3-hydroxyadipic acid, α-hydromuconic acid, and/or adipic acid in high yield can be obtained by impairing the function of pyruvate kinase and enhancing the activities of PEP carboxykinase and of an enzyme that catalyzes the reaction of reducing 3-oxoadipyl-CoA to 3-hydroxyadipyl-CoA in a host microorganism, which is a microorganism that originally carries biosynthetic pathways for the above substances.

[0037] Microorganisms that originally have an ability to produce 3-hydroxyadipic acid include microorganisms belonging to the following species:

[0038] species of the genus Escherichia, such as Escherichia fergusonii and Escherichia coli;

[0039] species of the genus Pseudomonas, such as Pseudomonas chlororaphis, Pseudomonas putida, Pseudomonas azotoformans, and Pseudomonas chlororaphis subsp. aureofaciens;

[0040] species of the genus Hafnia, such as Hafnia alvei;

[0041] species of the genus Corynebacterium, such as Corynebacterium acetoacidophilum, Corynebacterium acetoglutamicum, Corynebacterium ammoniagenes, and Corynebacterium glutamicum;

[0042] species of the genus Bacillus, such as Bacillus badius, Bacillus magalerium, and Bacillus roseus;

[0043] species of the genus Streptomyces, such as Streptomyces vinaceus, Streptomyces karnatakensis, and Streptomyces olivaceus;

[0044] species of the genus Cupriavidus, such as Cupriavidus metallidurans, Cupriavidus necator, and Cupriavidus oxalaticus;

[0045] species of the genus Acinetobacter, such as Acinetobacter baylyi and Acinetobacter radioresistens;

[0046] species of the genus Alcaligenes, such as Alcaligenes faecalis;

[0047] species of the genus Nocardioides, such as Nocardioides albus;

[0048] species of the genus Brevibacterium, such as Brevibacterium iodinum;

[0049] species of the genus Delftia, such as Delftia acidovorans;

[0050] species of the genus Shimwellia, such as Shimwellia blattae;

[0051] species of the genus Aerobacter, such as Aerobacter cloacae;

[0052] species of the genus Rhizobium, such as Rhizobium radiobacter;

[0053] species of the genus Serratia, such as Serratia grimesii, Serratia ficaria, Serratia fonticola, Serratia odorifera, Serratia plymuthica, Serratia entomophila, and Serratia nematodiphila.

[0054] In cases where a genetically modified microorganism according to the present invention originally has no ability to produce 3-hydroxyadipic acid, an appropriate combination of nucleic acids that encode enzymes catalyzing the reactions A, B, and E can be introduced into the microorganism to impart those production abilities.

[0055] Microorganisms that are speculated to originally have an ability to produce α-hydromuconic acid include microorganisms belonging to the following species:

[0056] species of the genus Escherichia, such as Escherichia fergusonii and Escherichia coli;

[0057] species of the genus Pseudomonas, such as Pseudomonas fluorescens, Pseudomonas putida, Pseudomonas azotoformans, and Pseudomonas chlororaphis subsp. aureofaciens;

[0058] species of the genus Hafnia, such as Hafnia alvei;

[0059] species of the genus Bacillus, such as Bacillus badius;

[0060] species of the genus Cupriavidus. such as Cupriavidus metallidurans, Cupriavidus numazuensis, and Cupriavidus oxalaticus;

[0061] species of the genus Acinetobacter, such as Acinetobacter baylyi and Acinetobacter radioresistens;

[0062] species of the genus Alcaligenes, such as Alcaligenesfaecalis;

[0063] species of the genus Delftia, such as Delftia acidovorans;

[0064] species of the genus Shimwellia, such as Shimwellia blattae;

[0065] species of the genus Serratia, such as Serratia grimesii, Serratia ficaria, Serratia fonticola, Serratia odorifera, Serratia plymuthica, Serratia entomophila, and Serratia nematodiphila.

[0066] In cases where a genetically modified microorganism according to the present invention originally has no ability to produce α-hydromuconic acid, an appropriate combination of nucleic acids that encode enzymes catalyzing the reactions A, B, C, and F can be introduced into the microorganism to impart those production abilities.

[0067] Microorganisms that are speculated to originally have the ability to produce adipic acid include microorganisms belonging to the genus Thermobifida, such as Thermobifida fusca. In cases where a genetically modified microorganism according to the present invention originally has no ability to produce adipic acid, an appropriate combination of nucleic acids that encode enzymes catalyzing the reactions A, B, C, D, and G can be introduced into the microorganism to impart those production abilities.

[0068] In the present invention, examples of the microorganism that can be used as a host to obtain the genetically modified microorganism preferably include the microorganisms listed above, especially preferably microorganisms belonging to the genera Escherichia, Serratia, Hafnia, Pseudomonas, Corynebacterium, Bacillus, Streptomyces, Cupriavidus, Acinetobacter, Alcaligenes, Brevibacterium, Delftia, Shimwellia, Aerobacter, Rhizobium, Thermobifida, Clostridium, Schizosaccharomyces, Kluyveromyces, Pichia, and Candida. Among these, microorganisms belonging to the genera Escherichia, Serratia, Hafnia, and Pseudomonas are especially preferred.

[0069] Specific examples of the enzyme that catalyzes the reaction of reducing 3-oxoadipyl-CoA to 3-hydroxyadipyl-CoA include the polypeptides described in (a) to (c) below:

(a) a polypeptide composed of an amino acid sequence represented by any one of SEQ ID NOs: 1 to 7;
(b) a polypeptide composed of the same amino acid sequence as that represented by any one of SEQ ID NOs: 1 to 7, except that one or several amino acids are substituted, deleted, inserted, and/or added, and having an enzymatic activity that catalyzes a reaction to reduce 3-oxoadipyl-CoA to 3-hydroxyadipyl-CoA;
(c) a polypeptide composed of an amino acid sequence with a sequence identity of not less than 70% to the sequence represented by any one of SEQ ID NOs: 1 to 7 and having activity in reduction of 3-oxoadipyl-CoA to 3-hydroxyadipyl-CoA.

[0070] In addition, either an enzyme classified as 3-hydroxyacyl-CoA dehydrogenase with EC number 1.1.1.35 or an enzyme classified as 3-hydroxybutyryl-CoA dehydrogenase with EC number 1.1.1.157 can also be used as an enzyme with 3-oxoadipyl-CoA reductase activity. Specifically, PaaH from Pseudomonas putida strain KT2440 (NCBI-Protein ID: NP_745425.1), PaaH from Escherichia coli strain K-12 substrain MG1655 (NCBI-Protein ID: NP_415913.1), DcaH from Acinetobacter baylyi strain ADPI (NCBI-Protein ID: CAG68533.1), PaaH from Serratia plymuthica strain NBRC102599 (NCBI-Protein ID: WP_063197120), and a polypeptide from Serratia nematodiphila strain DSM21420 (NCBI-Protein ID: WP_033633399.1) are also included as examples of the enzyme that catalyzes the reaction of reducing 3-oxoadipyl-CoA to 3-hydroxyadipyl-CoA. Among these, the polypeptides described in (a) to (c) above are preferred.

[0071] For the polypeptide used in the present invention and composed of the same amino acid sequence as that represented by any one of SEQ ID NOs: 1 to 7, except that one or several amino acids are substituted, deleted, inserted, and/or added, and having 3-oxoadipyl-CoA reductase activity, the range represented by the phrase “one or several” is preferably 10 or less, more preferably 5 or less, especially preferably 4 or less, and most preferably one or two. In the case of amino acid substitution, the activity of the original polypeptide is more likely to be maintained when an amino acid(s) is/are replaced by an amino acid(s) with similar properties (so-called conservative substitution). That is, the physiological properties of the original polypeptide are often maintained when an amino acid(s) is/are replaced by an amino acid(s) with similar properties. Therefore, in the case of substitution, a given amino acid is preferably replaced by another amino acid with similar properties. That is, the natural 20 amino acids that make up natural proteins can be divided into groups of amino acids with similar properties, such as neutral amino acids with a less polar side chain (Gly, Ile, Val, Leu, Ala, Met, Pro), neutral amino acids with a hydrophilic side chain (Asn, Gin, Thr, Ser, Tyr, Cys), acidic amino acids (Asp, Glu), and basic amino acids (Arg, Lys, His), and aromatic amino acids (Phe, Tyr, Trp). It is often the case that substitution between amino acids in the same group does not change the properties of the original polypeptide.

[0072] For the polypeptide used in the present invention and having an amino acid sequence with a sequence identity of not less than 70% to the sequence represented by any one of SEQ ID NOs: 1 to 7 and having 3-oxoadipyl-CoA reductase activity, the sequence identity is preferably not less than 80%, more preferably not less than 85%, further preferably not less than 90%, still further preferably not less than 95%, yet further preferably not less than 97%, and even further preferably not less than 99%.

[0073] In the present invention, the term “sequence identity” means a ratio (percentage) of the number of identical amino acid or nucleotide residues relative to the total number of amino acid or nucleotide residues over the overlapping portion of an amino acid sequence alignment (including an amino acid corresponding to the translation start site) or a nucleotide sequence alignment (including the start codon), which is obtained by aligning two amino acid or nucleotide sequences with or without introduction of gaps for an optimal match, and is calculated by the following formula (1). In the formula (1), the length of a shorter sequence being compared is not less than 400 amino acids; in cases where the length of the shorter sequence is less than 400 amino acids, the sequence identity is not defined. The sequence identity can be easily determined using BLAST (Basic Local Alignment Search Tool), an algorithm widely used in this field. For example, BLAST is publicly available on a website, such as that of NCBI (National Center for Biotechnology Information) or KEGG (Kyoto Encyclopedia of Genes and Genomes), on which the sequence identity can be easily determined using default parameters. Additionally, the sequence identity can also be determined using a similar function implemented in a software program such as Genetyx.

Sequence identity (%)=the number of matches (without counting the number of gaps)/the length of a shorter sequence (excluding the terminal gaps)×100 Formula (1)

[0074] By using a function of Genetyx (% Identity Matrix) to calculate sequence identities based on the formula (1) among the amino acid sequences represented by SEQ ID NOs: 1 to 7, the lowest sequence identity of 71.51% is found between the sequences represented by SEQ ID NOs: 2 and 4, and the sequence identities among the amino acid sequences represented by SEQ ID NOs: 1 to 7 are found to be at least not less than 70%. The results of calculation of sequence identity using Genetyx are presented in Table 1. In Table 1 below, the numbers in the leftmost column represent SEQ ID NOs.

TABLE 1
[GENETYX: % Identity Matrix]

| | | | | | | |
|---|---|---|---|---|---|---|
| 1 | 2 | 3 | 4 | 5 | 6 | 7 |
| Serratia | Serratia | Serratia | Serratia | Serratia | Serratia | Serratia |

[%]

| | | | | | | | | |
|---|---|---|---|---|---|---|---|---|
| 1 | Serratia marcescens ATCC13880 | * | | | | | | |
| 2 | Serratia nematodiphila DSM21420 | 98.23 | * | | | | | |
| 3 | Serratia plymuthica NBRC102599 | 72.10 | 71.51 | * | | | | |
| 4 | Serratia proteamaculans 568 | 72.29 | 71.51 | 86.24 | * | | | |
| 5 | Serratia ureilytica Lr5/4 | 90.76 | 90.76 | 72.88 | 73.28 | * | | |
| 6 | Serratia sp. BW106 | 72.29 | 71.90 | 87.03 | 92.33 | 73.67 | * | |
| 7 | Serratia liquefaciens FK01 | 72.29 | 71.70 | 84.67 | 86.83 | 73.47 | 87.81 | * |

[Match Count/Length]

| | | | | | | | | |
|---|---|---|---|---|---|---|---|---|
| 1 | Serratia marcescens ATCC13880 | * | | | | | | |
| 2 | Serratia nematodiphila DSM21420 | 500/509 | * | | | | | |
| 3 | Serratia plymuthica NBRC102599 | 367/509 | 364/509 | * | | | | |
| 4 | Serratia proteamaculans 568 | 368/509 | 364/509 | 439/509 | * | | | |
| 5 | Serratia ureilytica Lr5/4 | 462/509 | 462/509 | 371/509 | 373/509 | * | | |
| 6 | Serratia sp. BW106 | 368/509 | 366/509 | 443/509 | 470/509 | 375/509 | * | |
| 7 | Serratia liquefaciens FK01 | 368/509 | 365/509 | 431/509 | 442/509 | 374/509 | 447/509 | * |

* Gaps are NOT taken into account.

[0075] When each of the amino acid sequences represented by SEQ ID NOs: 1 to 7 as queries was compared using BLASTP to all the amino acid sequences registered in the NCBI amino acid database (non-redundant protein sequences) to determine sequence identities, all sequences with a sequence identity of not less than 70% were found to be from bacteria of the genus Serratia.

[0076] All the polypeptides represented by SEQ ID NOs: 1 to 7 as described above in (a) contain a common sequence 1 composed of 24 amino acid residues and represented by SEQ ID NO: 173 within a region from the 15th to the 38th amino acid residues from the N terminus (hereinafter, an amino acid residue at the n-th position from the N terminus may conveniently be represented by n “a.a.”; for example, the region from the 15th to the 38th amino acid residues from the N terminus may be thus simply represented by “15 to 38 a.a.”). In the common sequence 1, Xaa represents an arbitrary amino acid residue, and the 13 a.a. is preferably a phenylalanine or leucine, and the 15 a.a. is preferably a leucine or glutamine, and the 16 a.a. is preferably a lysine or asparagine, and the 17 a.a. is a glycine or serine, more preferably a glycine, and the 19 a.a. is preferably a proline or arginine, and the 21 a.a. is preferably a leucine, methionine, or valine. The common sequence 1 corresponds to the region including the NAD⁺-binding residue and the surrounding amino acid residues. In the NAD⁺-binding residues, the 24th amino acid residue in the common sequence 1 should be an aspartic acid, as described in Biochimie., 2012 February, 94 (2): 471-8., but in the common sequence 1, the residue is an asparagine, which is characteristic. It is thought that the presence of the common sequence 1 causes the polypeptides represented by SEQ ID NOs: 1 to 7 to show excellent enzymatic activity as 3-oxoadipyl-CoA reductases.

[0077] The polypeptides as described above in (b) and (c) also preferably contain the common sequence 1 composed of 24 amino acid residues and represented by SEQ ID NO: 173 within a region from 1 to 200 a.a. The common sequence is more preferably located within a region from 1 to 150 a.a., and further preferably within a region from 1 to 100 a.a. Specific examples of the polypeptides include those with the amino acid sequences represented by SEQ ID NOs: 8 to 86. The amino acid sequences represented by SEQ ID NOs: 8 to 86 contain the common sequence 1 composed of 24 amino acid residues and represented by SEQ ID NO: 173 within a region from 15 to 38 a.a. The amino acid sequences represented by SEQ ID NOs: 8 to 86 have a sequence identity of not less than 90% to the amino acid sequence represented by any one of SEQ ID NOs: 1 to 7. The results of calculation of sequence identity using Genetyx are presented in Tables 2-1 to 2-3 and Tables 3-1 to 3-3.

TABLE 2-1
[GENETYX: % Identity Matrix]

| | | 1 | 2 | 3 | 4 | 5 | 6 | 7 |
|---|---|---|---|---|---|---|---|---|
| [%] | | Serratia | Serratia | Serratia | Serratia | Serratia | Serratia | Serratia |
| 1 | Serratia marcescens ATCC13880 | * | | | | | | |
| 2 | Serratia nematodiphila DSM21420 | 98.23 | * | | | | | |
| 3 | Serratia plymuthica NBRC102599 | 72.10 | 71.51 | * | | | | |
| 4 | Serratia proteamaculans 568 | 72.29 | 71.51 | 86.24 | * | | | |
| 5 | Serratia ureilytica Lr5/4 | 90.76 | 90.76 | 72.38 | 73.28 | * | | |
| 6 | Serratia sp. BW106 | 72.29 | 71.90 | 87.03 | 92.33 | 73.67 | * | |
| 7 | Serratia liquefaciens FK01 | 72.29 | 71.70 | 84.67 | 86.83 | 73.47 | 87.81 | * |
| 8 | Serratia sp. S119 | 94.89 | 94.30 | 72.88 | 72.49 | 91.55 | 73.08 | 72.83 |
| 9 | Serratia sp. YD25 | 92.33 | 92.33 | 72.49 | 72.49 | 93.51 | 72.69 | 72.88 |
| 10 | Serratia sp. FS14 | 98.62 | 99.60 | 71.70 | 71.70 | 91.15 | 72.10 | 72.10 |
| 11 | Serratia sp. HMSC15F11 | 94.89 | 94.30 | 73.28 | 73.28 | 91.35 | 73.47 | 73.47 |
| 12 | Serratia sp. JKS000199 | 90.76 | 90.76 | 72.69 | 73.08 | 99.41 | 73.47 | 73.28 |
| 13 | Serratia sp. TEL | 90.56 | 90.56 | 72.88 | 73.28 | 99.80 | 73.67 | 73.47 |
| 14 | Serratia sp. ISTD04 | 90.56 | 90.56 | 72.49 | 73.08 | 99.41 | 73.47 | 73.28 |
| 15 | Serratia sp. SCBI | 90.76 | 90.76 | 72.88 | 73.28 | 99.60 | 70 47 | 73.47 |
| 16 | Serratia sp. S4 | 72.10 | 71.31 | 86.44 | 98.62 | 73.08 | 91.94 | 86.64 |
| 17 | Serratia sp. C-1 | 72.49 | 71.90 | 98.03 | 86.05 | 73.28 | 86.64 | 84.08 |
| 18 | Serratia marcescens 532 | 99.80 | 98.03 | 72.29 | 72.10 | 90.56 | 72.10 | 72.10 |
| 19 | Serratia marcescens 2880STDY5683033 | 99.60 | 97.83 | 72.10 | 72.29 | 90.37 | 72.10 | 72.29 |
| 2C | Serratia marcescens WW4 | 98.42 | 99.41 | 71.90 | 71.90 | 90.96 | 72.29 | 71.90 |
| 21 | Serratia marcescens K27 | 98.23 | 99.21 | 71.31 | 71.31 | 90.96 | 71.70 | 71.70 |
| 22 | Serratia marcescens 280 | 98.42 | 99.41 | 71.70 | 71.70 | 90.96 | 72.10 | 72.10 |
| 23 | Serratia marcescens 19F | 98.42 | 99.41 | 71.51 | 71.70 | 90.96 | 72.10 | 72.10 |
| 24 | Serratia marcescens 1185 | 98.23 | 99.60 | 71.31 | 71.31 | 90.37 | 71.70 | 71.51 |

* Gaps are NOT taken into account.

TABLE 2-2

| | | | | | | | | |
|---|---|---|---|---|---|---|---|---|
| 25 | Serratia marcescens S217 | 98.23 | 99.21 | 71.31 | 71.51 | 90.96 | 71.90 | 71.90 |
| 26 | Serratia marcescens KHCo-24B | 98.03 | 99.80 | 71.31 | 71.31 | 90.56 | 71.70 | 71.90 |
| 27 | Serratia marcescens Z6 | 98.03 | 99.01 | 71.70 | 71.90 | 90.56 | 72.29 | 71.90 |
| 28 | Serratia marcescens 546 | 97.83 | 99.21 | 71.51 | 71.70 | 90.37 | 72.10 | 71.70 |
| 29 | Serratia nematodiphila MB307 | 98.03 | 99.80 | 71.31 | 71.51 | 90.56 | 71.90 | 71.70 |
| 30 | Serratia marcescens VGH107 | 93.03 | 99.01 | 71.31 | 71.51 | 90.56 | 71.90 | 71.90 |
| 31 | Serratia marcescens MCB | 95.48 | 95.28 | 72.29 | 72.69 | 91.15 | 72.88 | 72.69 |
| 32 | Serratia marcescens AH0650 | 95.67 | 95.48 | 72.29 | 72.69 | 90.76 | 73.28 | 72.69 |
| 33 | Serratia marcescens UMH12 | 95.48 | 95.28 | 72.10 | 72.49 | 90.56 | 73.08 | 72.49 |
| 34 | Serratia sp. M3 | 95.48 | 95.28 | 72.29 | 72.49 | 90.76 | 73.28 | 72.69 |
| 35 | Serratia marcescens UMH11 | 95.28 | 95.08 | 72.10 | 72.69 | 90.56 | 73.47 | 72.49 |
| 36 | Serratia marcescens UMH1 | 95.08 | 94.89 | 72.29 | 72.49 | 90.17 | 73.08 | 72.29 |
| 37 | Serratia marcescens 2880STDY5683020 | 95.48 | 94.89 | 73.08 | 72.69 | 92.14 | 73.28 | 73.08 |
| 38 | Serratia marcescens 99 | 95.48 | 94.69 | 73.28 | 72.88 | 91.55 | 73.67 | 73.28 |
| 39 | Serratia marcescens 374 | 94.89 | 94.69 | 72.29 | 72.29 | 90.17 | 73.08 | 72.29 |
| 40 | Serratia marcescens 2880STDY5683036 | 95.28 | 94.49 | 73.08 | 72.69 | 91.35 | 73.47 | 73.08 |
| 41 | Serratia marcescens 2880STDY5683034 | 95.28 | 94.69 | 73.08 | 72.69 | 91.94 | 73.28 | 73.08 |
| 42 | Serratia marcescens 2880STDY5682892 | 95.28 | 94.69 | 73.28 | 72.88 | 91.94 | 73.47 | 73.28 |
| 43 | Serratia marcescens SM39 | 95.08 | 94.49 | 73.28 | 72.69 | 92.14 | 73.28 | 73.28 |
| 44 | Serratia marcescens 189 | 95.08 | 94.49 | 73.28 | 72.88 | 92.14 | 73.47 | 73.28 |
| 45 | Serratia marcescens SMB2099 | 95.08 | 94.49 | 73.47 | 72.69 | 91.74 | 73.67 | 73.47 |
| 46 | Serratia marcescens 2880STDY5682862 | 94.89 | 94.30 | 73.47 | 72.88 | 91.55 | 73.47 | 73.47 |
| 47 | Serratia marcescens SE4145 | 94.89 | 94.30 | 73.08 | 72.49 | 91.94 | 73.08 | 73.08 |
| 48 | Serratia marcescens 2880STDY5682876 | 95.08 | 94.49 | 73.28 | 72.88 | 91.74 | 73.47 | 73.28 |
| 49 | Serratia marcescens 709 | 95.08 | 94.49 | 73.08 | 72.69 | 91.74 | 73.28 | 73.08 |
| 50 | Serratia marcescens MGH136 | 94.89 | 94.30 | 72.88 | 72.49 | 91.94 | 73.08 | 72.88 |
| 51 | Serratia marcescens 2880STDY5682884 | 94.69 | 94.10 | 72.88 | 72.49 | 91.74 | 73.08 | 73.08 |
| 52 | Serratia marcescens D-3 | 95.08 | 94.49 | 73.08 | 72.69 | 91.74 | 73.28 | 73.08 |
| 53 | Serratia marcescens 2880STDY5682957 | 94.89 | 94.30 | 72.88 | 72.69 | 91.55 | 73.28 | 72.88 |
| 54 | Serratia marcescens YDC563 | 94.69 | 94.10 | 72.88 | 72.69 | 91.35 | 73.28 | 72.88 |
| 55 | Serratia marcescens 2880STDY5683035 | 94.89 | 94.30 | 73.08 | 72.69 | 91.55 | 73.28 | 73.08 |

TABLE 2-3

| | | | | | | | | |
|---|---|---|---|---|---|---|---|---|
| 56 | Serratia marcescens 2880STDY5682930 | 94.69 | 94.10 | 72.88 | 72.49 | 91.35 | 73.08 | 72.88 |
| 57 | Serratia marcescens 790 | 94.49 | 94.30 | 73.28 | 72.88 | 91.35 | 73.47 | 73.28 |
| 58 | Serratia marcescens UMH5 | 93.51 | 92.92 | 72.69 | 72.88 | 90.37 | 72.69 | 72.49 |
| 59 | Serratia marcescens 2880STDY5682988 | 93.32 | 92.73 | 72.69 | 72.88 | 90.17 | 72.69 | 72.49 |
| 60 | Serratia marcescens 945154301 | 94.89 | 94.30 | 73.28 | 73.28 | 91.35 | 73.67 | 73.47 |
| 61 | Serratia marcescens at10508 | 94.69 | 94.10 | 73.47 | 73.47 | 91.15 | 73.67 | 73.67 |
| 62 | Serratia marcescens ML2637 | 94.49 | 93.90 | 73.28 | 73.47 | 90.96 | 73.67 | 73.67 |
| 63 | Serratia marcescens SM1978 | 94.30 | 93.71 | 73.28 | 73.28 | 90.76 | 73.67 | 73.67 |
| 64 | Serratia marcescens PWN146 | 94.10 | 93.51 | 72.88 | 72.88 | 90.96 | 72.88 | 73.28 |
| 65 | Serratia marcescens H1q | 92.53 | 92.53 | 72.49 | 72.49 | 93.51 | 72.69 | 73.08 |
| 66 | Serratia marcescens UMH6 | 91.15 | 91.15 | 72.69 | 73.08 | 99.60 | 73.47 | 73.28 |
| 67 | Serratia nematodiphila WCU338 | 91.15 | 91.15 | 72.69 | 73.08 | 99.41 | 73.47 | 73.28 |
| 68 | Serratia sp. OLEL1 | 90.96 | 90.96 | 72.88 | 73.28 | 99.80 | 73.67 | 73.47 |
| 69 | Serratia marcescens 7209 | 90.96 | 90.96 | 72.49 | 72.88 | 99.41 | 73.28 | 73.08 |
| 70 | Serratia marcescens sicaria (Ss1) | 90.96 | 90.96 | 72.69 | 73.08 | 99.41 | 73.28 | 73.28 |
| 71 | Serratia sp. OLFL2 | 90.76 | 90.76 | 72.69 | 73.08 | 99.60 | 73.47 | 73.28 |
| 72 | Serratia marcescens BIDMC 81 | 90.76 | 90.76 | 72.88 | 73.28 | 99.60 | 73.67 | 73.47 |
| 73 | Serratia marcescens BIDMC 50 | 90.76 | 90.76 | 72.69 | 73.08 | 99.21 | 73.47 | 73.28 |
| 74 | Serratia marcescens UMH7 | 90.56 | 90.56 | 72.88 | 73.28 | 99.80 | 73.67 | 73.47 |
| 75 | Serratia marcescens RSC-14 | 90.56 | 90.56 | 72.88 | 73.47 | 99.21 | 73.87 | 73.67 |
| 76 | Serratia marcescens SM03 | 92.33 | 92.33 | 72.29 | 72.29 | 93.51 | 72.49 | 72.88 |
| 77 | Serratia marcescens 90-166 | 90.17 | 89.78 | 72.49 | 73.47 | 96.66 | 73.67 | 73.08 |
| 78 | Serratia marcescens UMH2 | 90.76 | 90.76 | 72.88 | 73.28 | 99.21 | 73.67 | 73.47 |
| 79 | Serratia plymuthica AS9 | 72.49 | 71.90 | 96.66 | 85.06 | 73.47 | 86.05 | 83.69 |
| 80 | Serratia plymuthica tumat 205 | 72.69 | 72.10 | 98.03 | 86.24 | 73.47 | 86.64 | 84.28 |
| 81 | Serratia plymuthica A30 | 72.29 | 71.70 | 98.82 | 85.65 | 72.88 | 86.44 | 84.08 |
| 82 | Serratia plymuthica 4Rx13 | 72.29 | 71.70 | 97.83 | 85.85 | 73.08 | 86.44 | 84.28 |
| 83 | Serratia plymuthica V4 | 72.29 | 71.70 | 98.42 | 85.85 | 73.08 | 86.44 | 84.28 |
| 84 | Serratia plymuthica 3Rp8 | 72.29 | 71.70 | 98.62 | 86.05 | 73.08 | 86.64 | 84.08 |
| 85 | Serratia proteamaculans MFPA44A14 | 72.29 | 71.90 | 87.03 | 92.53 | 73.28 | 98.82 | 87.22 |
| 86 | Serratia plymuthica A153 | 72.10 | 71.51 | 99.21 | 86.05 | 72.88 | 86.64 | 84.47 |

TABLE 3-1
[Match Count/Length]

| | | 1 | 2 | 3 | 4 | 5 | 6 | 7 |
|---|---|---|---|---|---|---|---|---|
| | | Serratia | Serratia | Serratia | Serratia | Serratia | Serratia | Serratia |
| 1 | Serratia marcescens ATCC13880 | * | | | | | | |
| 2 | Sarratia nematodiphila DSM21420 | 500/500 | * | | | | | |
| 3 | Serratia plymuthica NBRC102599 | 367/509 | 364/500 | * | | | | |
| 4 | Serratia proteamaculans 568 | 368/509 | 364/509 | 439/509 | * | | | |
| 5 | Serratia ureilytica Lr5/4 | 462/509 | 462/509 | 371/509 | 373/509 | * | | |
| 6 | Serratia sp. BW106 | 368/500 | 366/509 | 443/509 | 470/509 | 375/509 | * | |
| 7 | Serratia liquefaciens FK01 | 368/509 | 365/509 | 431/509 | 442/509 | 374/509 | 447/509 | * |
| 8 | Serratia sp. S119 | 483/509 | 480/509 | 371/509 | 360/509 | 466/509 | 372/509 | 371/509 |
| 9 | Serratia sp. YD25 | 470/509 | 470/509 | 369/509 | 369/509 | 476/509 | 370/509 | 371/500 |
| 10 | Serratia sp. FS14 | 502/509 | 507/500 | 365/509 | 365/509 | 464/509 | 367/500 | 367/509 |
| 11 | Serratia sp. HMSC15F11 | 483/509 | 480/509 | 373/509 | 373/509 | 465/509 | 374/509 | 374/509 |
| 12 | Serratia sp. JKS000199 | 462/509 | 462/509 | 370/509 | 372/509 | 506/509 | 374/509 | 373/509 |
| 13 | Serratia sp. TEL | 461/509 | 461/509 | 371/509 | 373/509 | 508/509 | 375/509 | 374/509 |
| 14 | Serratia sp. ISTD04 | 461/509 | 461/509 | 369/509 | 372/509 | 506/509 | 374/509 | 373/509 |
| 15 | Serratia sp. SCBI | 462/509 | 462/509 | 371/509 | 373/509 | 507/509 | 374/509 | 374/509 |
| 16 | Serratia sp. S4 | 367/509 | 363/509 | 440/509 | 502/509 | 372/509 | 468/509 | 441/509 |
| 17 | Serratia sp. C-1 | 369/509 | 366/509 | 499/509 | 438/509 | 373/509 | 441/509 | 428/509 |
| 18 | Serratia marcescens 532 | 508/509 | 499/509 | 368/509 | 367/509 | 461/509 | 367/509 | 367/509 |
| 19 | Serratia marcescens 2880STDY5683033 | 507/509 | 498/509 | 367/509 | 368/509 | 460/509 | 367/509 | 368/509 |
| 20 | Serratia marcescens WW4 | 501/509 | 506/509 | 366/509 | 366/509 | 463/509 | 368/509 | 366/509 |
| 21 | Serratia marcescens K27 | 500/509 | 505/509 | 363/509 | 363/509 | 463/509 | 365/509 | 365/509 |
| 22 | Serratia marcescens 280 | 501/509 | 506/509 | 365/509 | 365/509 | 463/509 | 367/509 | 367/509 |
| 23 | Serratia marcescens 19F | 501/509 | 506/509 | 364/509 | 365/509 | 463/509 | 367/509 | 367/509 |
| 24 | Serratia marcescens 1185 | 500/509 | 507/509 | 363/509 | 363/509 | 460/509 | 365/509 | 364/509 |

TABLE 3-2

| | | | | | | | | |
|---|---|---|---|---|---|---|---|---|
| 25 | Serratia marcescens S217 | 500/509 | 505/509 | 363/509 | 364/509 | 463/509 | 366/509 | 366/509 |
| 26 | Serratia marcescens KHCo-24B | 499/509 | 508/509 | 363/509 | 363/509 | 461/509 | 365/509 | 366/509 |
| 27 | Serratia marcescens Z6 | 499/509 | 504/509 | 365/509 | 366/509 | 461/509 | 368/509 | 366/509 |
| 28 | Serratia marcescens 546 | 498/509 | 505/509 | 364/509 | 365/509 | 460/509 | 367/509 | 365/509 |
| 29 | Serratia nematodiphila MB307 | 499/509 | 508/509 | 363/509 | 364/509 | 461/509 | 366/509 | 365/509 |
| 30 | Serratia marcescens VGH107 | 499/509 | 504/509 | 363/509 | 364/509 | 461/509 | 366/509 | 366/509 |
| 31 | Serratia marcescens MCB | 486/509 | 485/509 | 368/509 | 370/509 | 464/509 | 371/509 | 370/509 |
| 32 | Serratia marcescens AH0650 | 487/509 | 486/509 | 368/509 | 370/509 | 462/509 | 373/509 | 370/509 |
| 33 | Serratia marcescens UMH12 | 486/509 | 485/509 | 367/509 | 369/509 | 461/509 | 372/509 | 369/509 |
| 34 | Serratia sp. OMLW3 | 486/509 | 485/509 | 368/509 | 369/509 | 462/509 | 373/509 | 370/509 |
| 35 | Serratia marcescens UMH11 | 485/509 | 484/509 | 367/509 | 370/509 | 461/509 | 374/509 | 369/509 |
| 36 | Serratia marcescens UMH1 | 484/509 | 483/509 | 368/509 | 369/509 | 459/509 | 372/509 | 368/509 |
| 37 | Serratia marcescens 2880STDY5683020 | 486/509 | 483/509 | 372/509 | 370/509 | 469/509 | 373/509 | 372/509 |
| 38 | Serratia marcescens 99 | 486/509 | 482/509 | 373/509 | 371/509 | 466/509 | 375/509 | 373/509 |
| 39 | Serratia marcescens 374 | 483/509 | 482/509 | 368/509 | 368/509 | 459/509 | 372/509 | 368/509 |
| 40 | Serratia marcescens 2880STDY5683036 | 485/509 | 481/509 | 372/509 | 370/509 | 465/509 | 374/509 | 372/509 |
| 41 | Serratia marcescens 2880STDY5683034 | 485/509 | 482/509 | 372/509 | 370/509 | 468/509 | 373/509 | 372/509 |
| 42 | Serratia marcescens 2880STDY5682892 | 485/509 | 482/509 | 373/509 | 371/509 | 468/509 | 374/509 | 373/509 |
| 43 | Serratia marcescens SM39 | 484/509 | 481/509 | 373/509 | 370/509 | 469/509 | 373/509 | 373/509 |
| 44 | Serratia marcescens 189 | 484/509 | 481/509 | 373/509 | 371/509 | 469/509 | 374/509 | 373/509 |
| 45 | Serratia marcescens SMB2099 | 484/509 | 481/509 | 374/509 | 370/509 | 467/509 | 375/509 | 374/509 |
| 46 | Serratia marcescens 2880STDY5682862 | 483/509 | 480/509 | 374/509 | 371/509 | 466/509 | 374/509 | 374/509 |
| 47 | Serratia marcescens SE4145 | 483/509 | 480/509 | 372/509 | 369/509 | 468/509 | 372/509 | 372/509 |
| 48 | Serratia marcescens 2880STDY5682876 | 484/509 | 481/509 | 373/509 | 371/509 | 467/509 | 374/509 | 373/509 |
| 49 | Serratia marcescens 709 | 484/509 | 481/509 | 372/509 | 370/509 | 467/509 | 373/509 | 372/509 |
| 50 | Serratia marcescens MGH136 | 483/509 | 480/509 | 371/509 | 369/509 | 468/509 | 372/509 | 371/509 |
| 51 | Serratia marcescens 2880STDY5682884 | 482/509 | 479/509 | 371/509 | 369/509 | 467/509 | 372/509 | 372/509 |
| 52 | Serratia marcescens D-3 | 484/509 | 481/509 | 372/509 | 370/509 | 467/509 | 373/509 | 372/509 |
| 53 | Serratia marcescens 2880STDY5682957 | 483/509 | 480/509 | 371/509 | 370/509 | 466/509 | 373/509 | 371/509 |
| 54 | Serratia marcescens YDC563 | 482/509 | 479/509 | 371/509 | 370/509 | 465/509 | 373/509 | 371/509 |
| 55 | Serratia marcescens 2880STDY5683035 | 483/509 | 480/509 | 372/509 | 370/509 | 466/509 | 373/509 | 372/509 |

TABLE 3-3

| | | | | | | | | |
|---|---|---|---|---|---|---|---|---|
| 56 | Serratia marcescens 2880STDY5682930 | 482/509 | 479/509 | 371/509 | 369/509 | 465/509 | 372/509 | 371/509 |
| 57 | Serratia marcescens 790 | 481/509 | 480/509 | 373/509 | 371/509 | 465/509 | 374/509 | 373/509 |
| 58 | Serratia marcescens UMH5 | 476/509 | 473/509 | 370/509 | 371/509 | 460/509 | 370/509 | 369/509 |
| 59 | Serratia marcescens 2880STDY5682988 | 475/509 | 472/509 | 370/509 | 371/509 | 459/509 | 370/509 | 369/509 |
| 60 | Serratia marcescens 945154301 | 483/509 | 480/509 | 373/509 | 373/509 | 465/509 | 375/509 | 374/509 |
| 61 | Serratia marcescens at10508 | 482/509 | 479/509 | 374/509 | 374/509 | 464/509 | 375/509 | 375/509 |
| 62 | Serratia marcescens ML2637 | 481/509 | 478/509 | 373/509 | 374/509 | 463/509 | 375/509 | 375/509 |
| 63 | Serratia marcescens SM1978 | 480/509 | 477/509 | 373/509 | 373/509 | 462/509 | 375/509 | 375/509 |
| 64 | Serratia marcescens PWN146 | 479/509 | 476/509 | 371/509 | 371/509 | 463/509 | 371/509 | 373/509 |
| 65 | Serratia marcescens H1q | 471/509 | 471/509 | 369/509 | 369/509 | 476/509 | 370/509 | 372/509 |
| 66 | Serratia marcescens UMH6 | 464/509 | 464/509 | 370/509 | 372/509 | 507/509 | 374/509 | 373/509 |
| 67 | Serratia nematodiphila WCU338 | 464/509 | 464/509 | 370/509 | 372/509 | 506/509 | 374/509 | 373/509 |
| 68 | Serratia sp. OLEL1 | 463/509 | 463/509 | 371/509 | 373/509 | 508/509 | 375/509 | 374/509 |
| 69 | Serratia marcescens 7209 | 463/509 | 463/509 | 369/509 | 371/509 | 506/509 | 373/509 | 372/509 |
| 70 | Serratia marcescens sicaria (Ss1) | 463/509 | 463/509 | 370/509 | 372/509 | 506/509 | 373/509 | 373/509 |
| 71 | Serratia sp. OLFL2 | 462/509 | 462/509 | 370/509 | 372/509 | 507/509 | 374/509 | 373/509 |
| 72 | Serratia marcescens BIDMC 81 | 462/509 | 462/509 | 371/509 | 373/509 | 507/509 | 375/509 | 374/509 |
| 73 | Serratia marcescens BIDMC 50 | 462/509 | 462/509 | 370/509 | 372/509 | 505/509 | 374/509 | 373/509 |
| 74 | Serratia marcescens UMH7 | 461/509 | 461/509 | 371/509 | 373/509 | 508/509 | 375/509 | 374/509 |
| 75 | Serratia marcescens RSC-14 | 461/509 | 461/509 | 371/509 | 374/509 | 505/509 | 376/509 | 375/509 |
| 76 | Serratia marcescens SM03 | 470/509 | 470/509 | 368/509 | 368/509 | 476/509 | 369/509 | 371/509 |
| 77 | Serratia marcescens 90-166 | 459/509 | 457/509 | 369/509 | 374/509 | 492/509 | 375/509 | 372/509 |
| 78 | Serratia marcescens UMH2 | 462/509 | 462/509 | 371/509 | 373/509 | 505/509 | 375/509 | 374/509 |
| 79 | Serratia plymuthica AS9 | 369/509 | 366/509 | 492/509 | 433/509 | 374/509 | 438/509 | 426/509 |
| 80 | Serratia plymuthica tumat 205 | 370/509 | 367/509 | 499/509 | 439/509 | 374/509 | 441/509 | 429/509 |
| 81 | Serratia plymuthica A30 | 368/509 | 365/509 | 503/509 | 436/509 | 371/509 | 440/509 | 428/509 |
| 82 | Serratia plymuthica 4Rx13 | 368/509 | 365/509 | 498/509 | 437/509 | 372/509 | 440/509 | 429/509 |
| 83 | Serratia plymuthica V4 | 368/509 | 365/509 | 501/509 | 437/509 | 372/509 | 440/509 | 429/509 |
| 84 | Serratia plymuthica 3Rp8 | 368/509 | 365/509 | 502/509 | 438/509 | 372/509 | 441/509 | 428/509 |
| 85 | Serratia proteamaculans MFPA44A14 | 368/509 | 366/509 | 443/509 | 471/509 | 373/509 | 503/509 | 444/509 |
| 86 | Serratia plymuthica A153 | 367/509 | 364/509 | 505/509 | 438/509 | 371/509 | 441/509 | 430/509 |

[0078] The nucleic acids encoding the polypeptides described in (a) to (c) according to the present invention may contain an additional sequence that encodes a peptide or protein added to the original polypeptides at the N terminus and/or the C terminus. Examples of such a peptide or protein can include secretory signal sequences, translocation proteins, binding proteins, peptide tags for purification, and fluorescent proteins. Among those peptides or proteins, a peptide or protein with a desired function can be selected depending on the purpose and can be added to the polypeptides of the present invention by those skilled in the art. It should be noted that the amino acid sequence of such a peptide or protein is excluded from the calculation of sequence identity.

[0079] The nucleic acids encoding the polypeptides represented by SEQ ID NOs: 1 to 86 are not specifically limited, as long as the nucleic acids have nucleotide sequences that can be translated to the amino acid sequences represented by SEQ ID NOs: 1 to 86, and the nucleotide sequences can be determined considering the set of codons (standard genetic code) corresponding to each amino acid. In this respect, the nucleotide sequences may be redesigned using codons that are frequently used by a host microorganism used in the present invention.

[0080] Specific examples of the nucleotide sequences of the nucleic acids that encode the polypeptides with the amino acid sequences represented by SEQ ID NOs: 1 to 86 include the nucleotide sequences represented by SEQ ID NOs: 87 to 172.

[0081] In the present invention, whether or not a polypeptide encoded by a certain nucleic acid has 3-oxoadipyl-CoA reductase activity is determined as follows: transformants A and B below are produced and grown in a culture test; if 3-hydroxyadipic acid or α-hydromuconic acid is confirmed in the resulting culture medium, it is judged that the nucleic acid encodes a polypeptide having 3-oxoadipyl-CoA reductase activity. The determination method will be described using the above scheme 1 which shows a biosynthesis pathway.

[0082] The transformant A has enzymes that catalyze the reactions A, E, and F. The transformant B has enzymes that catalyze the reactions A, C, F, and F.

[0083] The transformant A is first produced. Plasmids that allow for expression of the enzymes that catalyze the reactions A, E, and F are produced. The reactions E and F can be catalyzed by an identical enzyme. The plasmids are introduced into Escherichia coli strain BL21 (DE3), which is a microorganism strain lacking abilities to produce all of 3-hydroxyadipic acid, α-hydromuconic acid, and adipic acid. Into the obtained transformant, an expression plasmid carrying a nucleic acid that encodes a polypeptide to be analyzed for the presence of the enzymatic activity of interest and is integrated downstream of an appropriate promoter is introduced to obtain the transformant A. The transformant A is cultured, and the post-culture fluid is examined for the presence of 3-hydroxyadipic acid. Once the presence of 3-hydroxyadipic acid in the culture fluid is successfully confirmed, the transformant B is then produced. The transformant B is obtained by producing a plasmid for the expression of an enzyme that catalyzes the reaction C and introducing the resulting plasmid into the transformant A. The transformant B is cultured, and the post-culture fluid is examined for the presence of α-hydromuconic acid. When the presence of α-hydromuconic acid in the post-culture fluid is confirmed, it indicates that 3-hydroxyadipic acid produced in the transformant A and α-hydromuconic acid produced in the transformant B are generated via production of 3-hydroxyadipyl-CoA, and that the polypeptide of interest has 3-oxoadipyl-CoA reductase activity.

[0084] As the gene encoding the enzyme that catalyzes the reaction A, pcaF from Pseudomonas putida strain KT2440 (NCBI Gene ID: 1041755; SEQ ID NO: 174) is used.

[0085] As the genes encoding the enzyme that catalyzes the reactions E and F, a continuous sequence including the full lengths of pcaI and pcaJ from Pseudomonas putida strain KT2440 (NCBI Gene IDs: 1046613 and 1046612; SEQ ID NOs: 175 and 176) is used. The polypeptides encoded by pcaI and pcaJ forms a complex and then catalyze the reactions E and F.

[0086] As the nucleic acid encoding the enzyme that catalyzes the reaction C, the paaF gene from Pseudomonas putida strain KT2440 (NCBI Gene ID: 1046932, SEQ ID NO: 177) is used.

[0087] The method of culturing the transformant A and the transformant B is as follows. Antibiotics for stable maintenance of the plasmids and inducer substances for induction of expression of the polypeptides encoded by the incorporated nucleic acids may be added as appropriate to the culture. A loopful of either the transformant A or B is inoculated into 5 mL of the culture medium 1 (10 g/L Bacto Tryptone (manufactured by Difco Laboratories), 5 g/L Bacto Yeast Extract (manufactured by Difco Laboratories), 5 g/L sodium chloride) adjusted at pH 7 and is cultured at 30° C. with shaking at 120 min-1 for 18 hours to prepare a preculture fluid. Subsequently, 0.25 mL of the preculture fluid is added to 5 mL of the culture medium II (10 g/L succinic acid, 10 g/L glucose, 1 g/L ammonium sulfate, 50 mM potassium phosphate, 0.025 g/L magnesium sulfate, 0.0625 mg/L iron sulfate, 2.7 mg/L manganese sulfate, 0.33 mg/L calcium chloride, 1.25 g/L sodium chloride, 2.5 g/L Bacto Tryptone, 1.25 g/L Bacto Yeast Extract) adjusted to pH 6.5 and is cultured at 30° C. with shaking at 120 min-1 for 24 hours. The obtained culture fluid is examined for the presence of 3-hydroxyadipic acid or α-hydromuconic acid.

[0088] The presence of 3-hydroxyadipic acid or α-hydromuconic acid in the culture fluid can be confirmed by centrifuging the culture fluid and analyzing the supernatant with LC-MS/MS. The analysis conditions are as described below:

[0089] HPLC: 1290 Infinity (manufactured by Agilent Technologies, Inc.)

[0090] Column: Synergi hydro-RP (manufactured by Phenomenex Inc.), length: 100 mm, internal diameter: 3 mm, particle size: 2.5 μm

[0091] Mobile phase: 0.1% aqueous formic acid solution/methanol=70/30

[0092] Flow rate: 0.3 mL/min

[0093] Column temperature: 40° C.

[0094] LC detector: DAD (210 nm)

[0095] MS/MS: Triple-Quad LC/MS (manufactured by Agilent Technologies, Inc.) Ionization method: ESI in negative mode.

[0096] The 3-oxoadipyl-CoA reductase activity value can be calculated by quantifying 3-hydroxyadipyl-CoA generated from 3-oxoadipyl-CoA used as a substrate by using purified 3-oxoadipyl-CoA reductase. wherein the 3-oxoadipyl-CoA is prepared from 3-oxoadipic acid by an enzymatic reaction. The specific method is as follows.

[0097] 3-Oxoadipic acid can be prepared by a known method (for example, a method described in Reference Example 1 of WO 2017/099209).

[0098] Preparation of 3-oxoadipyl-CoA solution: A PCR using the genomic DNA of Pseudomonas putida strain KT2440 as a template is performed in accordance with routine procedures, to amplify a nucleic acid encoding a CoA transferase (pcaI and pcaJ; NCBI-GeneIDs: 1046613 and 1046612) in the full-length form. The nucleotide sequences of primers used in this PCR are, for example, those represented by SEQ ID NOs: 194 and 195. The amplified fragment is inserted into the KpnI site of pRSF-1b (manufactured by Novagen), an expression vector for E. coli, in frame with the histidine-tag sequence. The plasmid is introduced into E. coli BL21 (DE3), and the enzyme is expressed from the plasmid under isopropyl-β-thiogalactopyranoside (IPTG) induction and is then purified using the histidine tag from the culture fluid in accordance with routine procedures to obtain a CoA transferase solution. The solution is used to prepare an enzymatic reaction solution for 3-oxoadipyl-CoA preparation with the following composition, and the enzymatic reaction solution is kept at 25° C. for 3 minutes to allow the reaction to proceed and is then filtered through a UF membrane (Amicon Ultra-0.5 mL 10K; manufactured by Merck Millipore) to remove the enzyme, and the obtained filtrate is designated as 3-oxoadipyl-CoA solution.

### (Enzymatic Reaction Solution)

[0099] 100 mM Tris-HCl (pH 8.2)

[0100] 10 mM MgCl₂

[0101] 0.5 mM succinyl-CoA

[0102] 5 mM 3-oxoadipic acid sodium salt

[0103] 2 μM CoA transferase.

[0104] Identification of 3-oxoadipyl-CoA reductase activity: A PCR using the genomic DNA of a microorganism strain of interest as a template is performed in accordance with routine procedures, to amplify a nucleic acid encoding 3-oxoadipyl-CoA reductase in the full-length form. The nucleotide sequences of primers used in this PCR are, for example, those represented by SEQ ID NOs: 196 and 197. The amplified fragment is inserted into the BamHI site of pACYCDuet-1 (manufactured by Novagen), an expression vector for E. coli, in frame with the histidine-tag sequence. The plasmid is introduced into E. coli BL21 (DE3), and the enzyme is expressed from the plasmid under isopropyl-β-thiogalactopyranoside (IPTG) induction and is then purified using the histidine tag from the culture fluid in accordance with routine procedures to obtain a 3-oxoadipyl-CoA reductase solution. The 3-oxoadipyl-CoA reductase activity can be determined by using the enzyme solution to prepare an enzymatic reaction solution with the following composition and quantifying 3-hydroxyadipyl-CoA generated using the enzymatic reaction solution at 25° C.

### (Enzymatic Reaction Solution)

[0105] 100 mM Tris-HCl (pH 8.2)

[0106] 10 mM MgCl₂

[0107] 150 μL/mL 3-oxoadipyl-CoA solution

[0108] 0.5 mM NADH

[0109] 1 mM dithiothreitol

[0110] 10 μM 3-oxoadipyl-CoA reductase.

[0111] Specific examples of the enzymes that catalyze the reactions A and C to G are presented below. As an enzyme that catalyzes the reaction A to generate 3-oxoadipyl-CoA, for example, an acyl transferase (β-ketothiolase) can be used. The acyl transferase is not limited to a particular number in the EC classification but is preferably an acyl transferase classified into EC 2.3.1.-, specifically including an enzyme classified as 3-oxoadipyl-CoA thiolase and classified into EC number 2.3.1.174, an enzyme classified as acetyl-CoA C-acetyltransferase and classified into EC number 2.3.1.9, and an enzyme classified as acetyl-CoA C-acyl transferase and classified into EC number 2.3.1.16. Among these, PaaJ from Escherichia coli strain MG1655 (NCBI-Protein ID: NP_415915), PcaF from Pseudomonas putida strain KT2440 (NCBI-Protein ID: NP_743536), and the like can be suitably used.

[0112] Whether or not the above acyl transferases can generate 3-oxoadipyl-CoA from succinyl-CoA and acetyl-CoA as substrates can be determined by measuring a decrease in NADH coupled with reduction of 3-oxoadipyl-CoA in a combination of a reaction catalyzed by purified acyl transferase to generate 3-oxoadipyl-CoA and a reaction catalyzed by purified 3-oxoadipyl-CoA reductase to reduce 3-oxoadipyl-CoA as a substrate. The specific measurement method is, for example, as follows.

[0113] Identification of acyl transferase activity: A PCR using the genomic DNA of a subject microorganism strain as a template is performed in accordance with routine procedures, to amplify a nucleic acid encoding an acyl transferase in the full-length form. The amplified fragment is inserted into the SacI site of pACYCDuet-1 (manufactured by Novagen), an expression vector for E. coli, in-frame with the histidine-tag sequence. The plasmid is introduced into E. coli BL21 (DE3), and expression of the enzyme is induced with isopropyl-p-thiogalactopyranoside (IPTG) in accordance with routine procedures and the enzyme is purified using the histidine tag from the culture fluid to obtain an acyl transferase solution. The acyl transferase activity can be determined by using the enzyme solution to prepare an enzymatic reaction solution with the following composition and measuring a decrease in absorbance at 340 nm coupled with oxidation of NADH at 30° C.

### 100 mM Tris-HCl (pH 8.0)

### 10 mM MgCl₂

[0114] 0.1 mM succinyl-CoA
0.2 mM acetyl-CoA

### 0.2 mM NADH

[0115] 1 mM dithiothreitol
10 μg/mL 3-oxoadipyl-CoA reductase
5 μg/mL acyl transferase.

[0116] Whether or not an enzyme originally expressed in a host microorganism used in the present invention has acyl transferase activity can be determined by performing the above-described measurement using CFE instead of purified acyl transferase. The specific measurement method targeted to E. coli is, for example, as follows.

[0117] Preparation of CFE: A loopful of E. coli strain MG1655 to be subjected to the measurement of the activity is inoculated into 5 mL of a culture medium (culture medium composition: 10 g/L tryptone, 5 g/L yeast extract, 5 g/L sodium chloride) adjusted to pH 7, and incubated at 30° C. with shaking for 18 hours. The obtained culture fluid is added to 5 mL of a culture medium (culture medium composition: 10 g/L tryptone, 5 g/L yeast extract, 5 g/L sodium chloride, 2.5 mM ferulic acid, 2.5 mM p-coumaric acid, 2.5 mM benzoic acid, 2.5 mM cis,cis-muconic acid, 2.5 mM protocatechuic acid, 2.5 mM catechol, 2.5 mM 3OA, 2.5 mM 3-hydroxyadipic acid, 2.5 mM α-hydromuconic acid, 2.5 mM adipic acid, 2.5 mM phenylethylamine) adjusted to pH 7, and incubated at 30° C. with shaking for 3 hours.

[0118] The obtained culture fluid is supplemented with 10 mL of 0.9% sodium chloride and then centrifuged to remove the supernatant from bacterial cells, and this operation is repeated three times in total to wash the bacterial cells. The washed bacterial cells are suspended in 1 mL of a Tris-HCl buffer composed of 100 mM Tris-HCl (pH 8.0) and 1 mM dithiothreitol, and glass beads (with a diameter of 0.1 mm) are added to the resulting suspension to disrupt the bacterial cells at 4° C. with an ultrasonic disruptor. The resulting bacterial homogenate is centrifuged to obtain the supernatant, and 0.5 mL of the supernatant is filtered through a UF membrane (Amicon Ultra-0.5 mL 10K; manufactured by Merck Millipore) to remove the resulting filtrate, followed by application of 0.4 mL of the Tris-HCl buffer to the UF membrane, and this operation is repeated three times in total to remove low-molecular-weight impurities, and the resulting supernatant is then resuspended in the Tris-HCl buffer to a final volume of 0.1 mL, which is designated as CFE. Instead of purified enzyme, 0.05 mL of the CFE is added to a total of 0.1 ml, of the enzymatic reaction solution to determine the enzymatic activity.

[0119] As an enzyme that catalyzes the reaction C to generate 2,3-dehydroadipyl-CoA, for example, an enoyl-CoA hydratase can be used. The enoyl-CoA hydratase is not limited by a particular number in the EC classification, and is preferably an enoyl-CoA hydratase classified into EC 4.2.1.-, specifically including an enzyme classified as enoyl-CoA hydratase or 2,3-dehydroadipyl-CoA hydratase and classified into EC 4.2.1.17. Among them, PaaF from Escherichia coli strain MG1655 (NCBI-ProteinID: NP_415911), PaaF from Pseudomonas putida strain KT2440 (NCBI-ProteinID: NP_745427), and the like can be suitably used.

[0120] Since the reaction catalyzed by enoyl-CoA hydratase is generally reversible, whether or not an enoyl-CoA hydratase has an activity to catalyze a reaction that generates 2,3-dehydroadipyl-CoA from 3-hydroxyadipyl-CoA used as a substrate can be determined by detecting 3-hydroxyadipyl-CoA generated using purified enoyl-CoA hydratase with 2,3-dehydroadipyl-CoA used as a substrate thereof, which is prepared from α-hydromuconic acid through an enzymatic reaction. The specific measurement method is, for example, as follows.

[0121] Preparation of α-hydromuconic acid: Preparation of α-hydromuconic acid is performed according to the method described in Reference Example 1 of WO 2016/199858 A1.

[0122] Preparation of 2,3-dehydroadipyl-CoA solution: A PCR using the genomic DNA of Pseudomonas putida strain KT2440 as a template is performed in accordance with routine procedures, to amplify a nucleic acid encoding a CoA transferase (including pcaI and pcaJ; NCBI-GeneIDs: 1046613 and 1046612) in the full-length form. The amplified fragment is inserted into the KpnI site of pRSF-1b (manufactured by Novagen), an expression vector for E. coli, in-frame with the histidine-tag sequence. The plasmid is introduced into E. coli BL21 (DE3), and expression of the enzyme is induced with isopropyl-β-thiogalactopyranoside (IPTG) in accordance with routine procedures and the enzyme is purified using the histidine tag from the culture fluid to obtain a CoA transferase solution. The solution is used to prepare an enzymatic reaction solution for 2,3-dehydroadipyl-CoA preparation with the following composition, which is allowed to react at 30° C. for 10 minutes and then filtered through a UF membrane (Amicon Ultra-0.5 mL 10K; manufactured by Merck Millipore) to remove the enzyme, and the obtained filtrate is designated as 2,3-dehydroadipyl-CoA solution.

[0123] Enzymatic reaction solution for 2,3-dehydroadipyl-CoA preparation

### 100 mM Tris-HCl (pH 8.0)

### 10 mM MgCl₂

[0124] 0.4 mM succinyl-CoA
2 mM α-hydromuconic acid sodium salt
20 μg/mL CoA transferase.

[0125] Identification of enoyl-CoA hydratase activity: A PCR using the genomic DNA of a subject microorganism strain as a template is performed in accordance with routine procedures, to amplify a nucleic acid encoding an enoyl-CoA hydratase in the full-length form. The amplified fragment is inserted into the NdeI site of pET-16b (manufactured by Novagen), an expression vector for E. coli, in-frame with the histidine-tag sequence. The plasmid is introduced into E. coli BL21 (DE3), and expression of the enzyme is induced with isopropyl-β-thiogalactopyranoside (IPTG) in accordance with routine procedures and the enzyme is purified using the histidine tag from the culture fluid to obtain an enoyl-CoA hydratase solution. The solution is used to prepare an enzymatic reaction solution with the following composition, which is allowed to react at 30° C. for 10 minutes and then filtered through a UF membrane (Amicon Ultra-0.5 mL 10K; manufactured by Merck Millipore) to remove the enzyme. The enoyl-CoA hydratase activity can be confirmed by detecting 3-hydroxyadipyl-CoA in the resulting filtrate on high-performance liquid chromatograph-tandem mass spectrometer (LC-MS/MS) (Agilent Technologies, Inc.).

### 100 mM Tris-HCl (pH8.0)

### 10 mM MgCl₂

[0126] 300 μL/mL 2,3-dehydroadipyl-CoA solution
1 mM dithiothreitol
20 μg/mL enoyl-CoA hydratase.

[0127] Whether or not an enzyme originally expressed in a host microorganism used in the present invention has enoyl-CoA hydratase activity can be determined by adding 0.05 mL of the CFE, instead of purified enoyl-CoA hydratase, to a total of 0.1 mL of the enzymatic reaction solution and performing the above-described measurement. The specific CFE preparation method targeted to E. coli is as described for that used in determination of acyl transferase activity.

[0128] As an enzyme that catalyzes the reaction D to generate adipyl-CoA, for example, an enoyl-CoA reductase can be used. The enoyl-CoA reductase is not limited by a particular number in the EC classification, and is preferably an enoyl-CoA reductase classified into EC 1.3.-.-, specifically including an enzyme classified as trans-2-enoyl-CoA reductase and classified into EC 1.3.1.44, and an enzyme classified as acyl-CoA dehydrogenase and classified into EC 1.3.8.7. These specific examples are disclosed in, for example JP 2011-515111 A, J Appl Microbiol. 2015 October; 119 (4): 1057-63., and the like; among them, TER from Euglena gracilis strain Z (UniProtKB: Q5EU90), Tfu_1647 from Thermobifida fusca strain YX (NCBI-ProteinID: AAZ55682), DcaA from Acinetobacter baylyi strain ADP1 (NCBI-ProteinID: AAL09094.1), and the like can be suitably used.

[0129] The fact that an enoyl-CoA reductase has an activity to generate adipyl-CoA from 2,3-dehydroadipyl-CoA used as a substrate can be confirmed by measuring a decrease in NADH coupled with reduction of 2,3-dehydroadipyl-CoA in a reaction using purified enoyl-CoA reductase with 2,3-dehydroadipyl-CoA used as a substrate thereof, which is prepared from α-hydromuconic acid through another enzymatic reaction.

[0130] Preparation of α-hydromuconic acid and of 2,3-dehydroadipyl-CoA solution can be performed in the same manner as described above.

[0131] Identification of enoyl-CoA reductase activity: A PCR using the genomic DNA of a subject microorganism strain as a template is performed in accordance with routine procedures, to amplify a nucleic acid encoding an enoyl-CoA reductase in the full-length form. The amplified fragment is inserted into the NdeI site of pET-16b (manufactured by Novagen), an expression vector for E. coli, in-frame with the histidine-tag sequence. The plasmid is introduced into E. coli BL21 (DE3), and expression of the enzyme is induced with isopropyl-β-thiogalactopyranoside (IPTG) in accordance with routine procedures and the enzyme is purified using the histidine tag from the culture fluid to obtain an enoyl-CoA reductase solution. The enoyl-CoA reductase activity can be determined by using the enzyme solution to prepare an enzymatic reaction solution with the following composition and measuring a decrease in absorbance at 340 nm coupled with oxidation of NADH at 30° C.

### 100 mM Tris-HCl (pH 8.0)

### 10 mM MgCl₂

[0132] 300 μL/mL 2,3-dehydroadipyl-CoA solution

### 0.2 mM NADH

[0133] 1 mM dithiothreitol
20 μg/mL enoyl-CoA reductase.

[0134] Whether or not an enzyme originally expressed in a host microorganism used in the present invention has enoyl-CoA reductase activity can be determined by adding 0.05 mL of the CFE, instead of purified enoyl-CoA reductase, to a total of 0.1 mL of the enzymatic reaction solution and performing the above-described measurement. The specific CFE preparation method targeted to E. coli is as described for that used in determination of acyl transferase activity.

[0135] As an enzyme that catalyzes the reaction E to generate 3-hydroxyadipic acid, the reaction F to generate α-hydromuconic acid, and the reaction G to generate adipic acid, for example, a CoA transferase or an acyl-CoA hydrolase, preferably a CoA transferase, can be used.

[0136] The CoA transferase is not limited by a particular number in the EC classification, and is preferably a CoA transferase classified into EC 2.8.3.-, specifically including an enzyme classified as CoA transferase or acyl-CoA transferase and classified into EC 2.8.3.6, and the like.

[0137] In the present invention, the term “CoA transferase” refers to an enzyme with activity (CoA transferase activity) to catalyze a reaction that generates carboxylic acid and succinyl-CoA from acyl-CoA and succinic acid used as substrates.

[0138] As an enzyme that catalyzes the reaction E to generate 3-hydroxyadipic acid and the reaction F to generate α-hydromuconic acid, PcaI and PcaJ from Pseudomonas putida strain KT2440 (NCBI-ProteinIDs: NP_746081 and NP_746082), and the like can be suitably used, among others.

[0139] As an enzyme that catalyzes the reaction G to generate adipic acid, Deal and DcaJ from Acinetobacter baylyi strain ADP1 (NCBI-ProteinIDs: CAG68538 and CAG68539), and the like can be suitably used.

[0140] Since the above enzymatic reactions are reversible, the CoA transferase activity against 3-hydroxyadipyl-CoA, 2,3-dehydroadipyl-CoA, or adipyl-CoA used as a substrate can be determined by detecting 3-hydroxyadipyl-CoA, 2,3-dehydroadipyl-CoA, or adipyl-CoA generated respectively using purified CoA transferase with 3-hydroxyadipic acid and succinyl-CoA, α-hydromuconic acid and succinyl-CoA, or adipic acid and succinyl-CoA used as substrates thereof. The specific measurement method is, for example, as follows.

[0141] Preparation of 3-hydroxyadipic acid: Preparation of 3-hydroxyadipic acid is performed according to the method described in Reference Example 1 of WO 2016/199856 A1.

[0142] Identification of CoA transferase activity using 3-hydroxyadipic acid as a substrate: A PCR using the genomic DNA of a subject microorganism strain as a template is performed in accordance with routine procedures, to amplify a nucleic acid encoding a CoA transferase in the full-length form. The amplified fragment is inserted into the KpnI site of pRSF-1b (manufactured by Novagen), an expression vector for E. coli, in-frame with the histidine-tag sequence. The plasmid is introduced into E. coli BL21 (DE3), and expression of the enzyme is induced with isopropyl-β-thiogalactopyranoside (IPTG) in accordance with routine procedures and the enzyme is purified using the histidine tag from the culture fluid to obtain a CoA transferase solution. The solution is used to prepare an enzymatic reaction solution with the following composition, which is allowed to react at 30° C. for 10 minutes and then filtered through a UF membrane (Amicon Ultra-0.5 mL 10K; manufactured by Merck Millipore) to remove the enzyme. The CoA transferase activity can be confirmed by detecting 3-hydroxyadipyl-CoA in the resulting filtrate on high-performance liquid chromatograph-tandem mass spectrometer (LC-MS/MS) (Agilent Technologies, Inc.).

### 100 mM Tris-HCl (pH 8.0)

### 10 mM MgCl₂

[0143] 0.4 mM succinyl-CoA
2 mM 3-hydroxyadipic acid sodium salt
20 μg/mL CoA transferase.

[0144] Preparation of α-hydromuconic acid: Preparation of α-hydromuconic acid is performed according to the method described in Reference Example 1 of WO 2016/199858 A1.

[0145] Identification of CoA transferase activity using α-hydromuconic acid as a substrate: A PCR using the genomic DNA of a subject microorganism strain as a template is performed in accordance with routine procedures, to amplify a nucleic acid encoding a CoA transferase in the full-length form. The amplified fragment is inserted into the KpnI site of pRSF-1b (manufactured by Novagen), an expression vector for E. coli, in-frame with the histidine-tag sequence. The plasmid is introduced into E. coli BL21 (DE3), and expression of the enzyme is induced with isopropyl-β-thiogalactopyranoside (IPTG) in accordance with routine procedures and the enzyme is purified using the histidine tag from the culture fluid to obtain a CoA transferase solution. The solution is used to prepare an enzymatic reaction solution with the following composition, which is allowed to react at 30° C. for 10 minutes and then filtered through a UF membrane (Amicon Ultra-0.5 mL 10K; manufactured by Merck Millipore) to remove the enzyme. The CoA transferase activity can be confirmed by detecting 2,3-dehydroadipyl-CoA in the resulting filtrate on high-performance liquid chromatograph-tandem mass spectrometer (LC-MS/MS) (Agilent Technologies, Inc.).

### 100 mM Tris-HCl (pH 8.0)

### 10 mM MgCl₂

[0146] 0.4 mM succinyl-CoA
2 mM α-hydromuconic acid sodium salt
20 μg/mL CoA transferase.

[0147] Identification of CoA transferase activity using adipic acid as a substrate: A PCR using the genomic DNA of a subject microorganism strain as a template is performed in accordance with routine procedures, to amplify a nucleic acid encoding a CoA transferase in the full-length form. The amplified fragment is inserted into the KpnI site of pRSF-1b (manufactured by Novagen), an expression vector for E. coli, in-frame with the histidine-tag sequence. The plasmid is introduced into E. coli BL21 (DE3), and expression of the enzyme is induced with isopropyl-s-thiogalactopyranoside (IPTG) in accordance with routine procedures and the enzyme is purified using the histidine tag from the culture fluid to obtain a CoA transferase solution. The solution is used to prepare an enzymatic reaction solution with the following composition, which is allowed to react at 30° C. for 10 minutes and then filtered through a UF membrane (Amicon Ultra-0.5 mL 10K; manufactured by Merck Millipore) to remove the enzyme. The CoA transferase activity can be confirmed by detecting adipyl-CoA in the resulting filtrate on high-performance liquid chromatograph-tandem mass spectrometer (LC-MS/MS) (Agilent Technologies, Inc.).

### 100 mM Tris-HCl (pH 8.0)

### 10 mM MgCl₂

[0148] 0.4 mM succinyl-CoA
2 mM adipic acid sodium salt
20 μg/mL CoA-transferase.

[0149] Whether or not an enzyme originally expressed in a host microorganism used in the present invention has CoA transferase activity can be determined by adding 0.05 mL of the CFE, instead of purified CoA transferase, to a total of 0.1 mL of the enzymatic reaction solution and performing the above-described measurement. The specific CFE preparation method targeted to E. coli is as described for that used in determination of acyl transferase activity.

[0150] In the present invention, where a nucleic acid encoding any one selected from the group consisting of a PEP carboxykinase, an acyl transferase, a 3-oxoadipyl-CoA reductase, an enoyl-CoA hydratase, an enoyl-CoA reductase, and a CoA transferase is introduced into a host microorganism, the nucleic acid may be artificially synthesized based on the amino acid sequence information of the enzyme in a database or be isolated from the natural environment. In cases where the nucleic acid is artificially synthesized, the usage frequency of codons corresponding to each amino acid in the nucleic acid sequence may be changed depending on the host microorganism into which the nucleic acid is introduced.

[0151] In cases where a nucleic acid encoding any one of the enzymes is isolated from the natural environment, the sources of the genes are not limited to particular organisms, and examples of the organisms include those of the genus Acinelobacter, such as Acinetobacter baylyi and Acinetobacter radioresistens; the genus Aerobacter, such as Aerobacter cloacae; the genus Alcaligenes, such as AlcaligenesfAecalis; the genus Bacillus, such as Bacillus badius, Bacillus magaierium, and Bacillus roseus; the genus Brevibacterium, such as Brevibacterium iodinum; the genus Corynebacterium, such as Corynebacterium acetoacidophilum, Corynebacterium acetoglutamicum, Corynebacterium ammoniagenes, and Corynebacterium glutamicum; the genus Cupriavidus, such as Cupriavidus metallidurans, Cupriavidus necator, Cupriavidus numazuensis, and Cupriavidus oxalaticus; the genus Delftia, such as Delftia acidovorans; the genus Escherichia, such as Escherichia coli and Escherichia fergusonii; the genus Hafnia, such as Hafnia alvei; the genus Microbacterium, such as Microbacterium ammoniaphilum; the genus Nocardioides, such as Nocardioides albus; the genus Planomicrobium, such as Planomicrobium okeanokoites; the genus Pseudomonas, such as Pseudomonas azotoformans, Pseudomonas chlororaphis, Pseudomonas fluorescens, Pseudomonas fragi, Pseudomonas putida, and Pseudomonas reptilivora; the genus Rhizobium, such as Rhizobium radiobacter; the genus Rhodosporidium, such as Rhodosporidium toruloides; the genus Saccharomyces, such as Saccharomyces cerevisiae; the genus Serratia, such as Serratia entomophila, Serratia ficaria, Serratia fonticola, Serratia grimesii, Serratia nematodiphila, Serratia odorifera, and Serratia plymuthica; the genus Shimwellia, such as Shimwellia blattae; the genus Streptomyces, such as Streptomyces vinaceus, Streptomyces karnatakensis, Streptomyces olivaceus, and Streptomyces vinaceus; the genus Yarrowia, such as Yarrowia lipolytica; the genus Yersinia, such as Yersinia ruckeri; the genus Euglena, such as Euglena gracilis; and the genus Thermobifida, such as Thermobifida fusca; and preferably include those of the genera Acinetobacter, Corynebacterium, Escherichia, Pseudomonas, Serratia, Euglena, and Thermobifida.

[0152] In the present invention, impairing the function of pyruvate kinase or a phosphotransferase system enzyme means impairing the enzymatic activity of the enzyme. The method of impairment of the function is not limited to a particular method, but the function can be impaired, for example, by disrupting a gene that encodes the enzyme, such as via partial or complete deletion of the gene by mutagenesis with a chemical mutagen, ultraviolet irradiation, or the like, or by site-directed mutagenesis or the like, or via introduction of a frame-shi ft mutation or a stop codon into the nucleotide sequence of the gene. Alternatively, recombinant DNA technologies can be used to disrupt the gene by partial or complete deletion of the nucleotide sequence or by partial or complete substitution of the nucleotide sequence with another nucleotide sequence. Among these, the methods for partial or complete deletion of the nucleotide sequence are preferred.

[0153] Pyruvate kinase is classified as EC 2.7.1.40 and is an enzyme that catalyzes a reaction to dephosphorylate phosphoenolpyruvic acid to pyruvic acid and ATP. Specific examples of pyruvate kinase include pykF (NCBI-Protein ID: NP_416191, SEQ ID NO: 178) and pykA (NCBI-Protein ID: NP_416368, SEQ ID NO: 179) from Escherichia coli strain K-12 substrain MG1655, and pykF (SEQ ID NO: 180) and pykA (SEQ ID NO: 181) from Serratia grimesii strain NBRC13537. In cases where a microorganism used in the present invention has two or more genes that each encode a pyruvate kinase, as illustrated in the metabolic pathway shown in the scheme 2 below, it is desirable to impair the function of all the pyruvate kinases. Whether or not a polypeptide encoded by a certain gene of a microorganism used in the present invention is a pyruvate kinase may be determined by BLAST (Basic Local Alignment Search Tool) searching on a website, such as that of NCBI (National Center for Biotechnology Information) or KEGG (Kyoto Encyclopedia of Genes and Genomes).

[0154] Phosphoenolpyruvate carboxykinase is classified as EC 4.1.1.49 and is an enzyme that catalyzes a reaction to generate oxaloacetic acid and ATP from phosphoenolpyruvic acid, carbon dioxide, and ADP. Specific examples of phosphoenolpyruvate carboxykinase include pck from Escherichia coli strain K-12 substrain MG1655 (NCBI-Protein ID: NP_417862, SEQ ID NO: 182) and pckA_1 (SEQ ID NO: 183) and pckA_2 (SEQ ID NO: 184) from Serratia grimesii strain NBRC13537.

[0155] Physiologically, PEP carboxykinase is responsible for a major reaction to produce glucose from fatty acids in the gluconeogenesis pathway. Though a reaction catalyzed by PEP carboxykinase is a reversible reaction, the reaction in the gluconeogenesis pathway proceeds in a direction which promotes conversion of oxaloacetic acid to PEP and carbon dioxide.

[0156] Whether or not a polypeptide encoded by a certain enzyme gene used in the present invention is a PEP carboxykinase may be determined by BLAST (Basic Local Alignment Search Tool) searching on a website, such as that of NCBI (National Center for Biotechnology Information) or KEGG (Kyoto Encyclopedia of Genes and Genomes).

[0157] JP 2015-146810 A describes that by means of metabolic network modeling, disruption of the PEP carboxykinase gene is found to be effective in the in silico generation of a microorganism strain capable of producing adipic acid from acetyl-CoA and succinyl-CoA in high yield. Additionally, JP 2015-504688 A describes that the PEP carboxykinase activity is enhanced for the purpose of increasing the pool of PEP for the production of muconic acid, which is produced biosynthetically from PEP. That is, from the description that the reaction catalyzed by PEP carboxykinase proceeds in a direction which promotes generation of PEP from oxaloacetic acid, it is appreciated by those skilled in the art that enhancement of the PEP carboxykinase activity by increased expression of the gene encoding the enzyme would result in decreased yields of 3-hydroxyadipic acid, α-hydromuconic acid, and/or adipic acid. However, in the present invention, it has been found that the production of 3-hydroxyadipic acid, α-hydromuconic acid, and/or adipic acid is increased in a genetically modified microorganism with an ability to produce 3-hydroxyadipic acid, α-hydromuconic acid, and/or adipic acid and with a pyruvate kinase defect and with increased expression of the phosphoenolpyruvate carboxykinase gene and of a gene encoding an enzyme that catalyzes the reaction of reducing 3-oxoadipyl-CoA to 3-hydroxyadipyl-CoA when the genetically modified microorganism is cultured, which is contrary to the above expectation.

[0158] In the genetically modified microorganism of the present invention, it is desirable that the function of a phosphotransferase system enzyme be further impaired. The phosphotransferase system enzyme refers to the phosphoenolpyruvate-dependent phosphotransferase system (PTS) (in this specification, also referred to as a PTS enzyme). PTS is a major mechanism for the uptake of carbohydrates such as hexose, hexitol, and disaccharide into a cell, as illustrated in the metabolic pathway shown in the scheme 2 below. PTS involves uptake of carbohydrates into a cell and simultaneous conversion of the carbohydrates to a phosphate ester, while converting a phosphate donor, PEP, to pyruvic acid.

[0159] Acetyl-CoA, an intermediate produced in the biosynthesis of 3-hydroxyadipic acid, α-hydromuconic acid, and/or adipic acid, can be synthesized from PEP via production of pyruvic acid by the functions of PTS enzymes.

[chemical structure]

[0160] PTS enzymes are composed of two common enzymes that exert their functions on any type of carbohydrate, phosphoenolpyruvate sugar phosphotransferase enzyme I and phospho carrier protein HPr, and membrane-bound sugar specific permeases (enzymes II) that are specific for particular carbohydrates. The enzymes II are further composed of sugar-specific components IIA, IIB, and IIC. The enzymes II exist as independent proteins or as fused domains in a single protein, and this depends on the organism which those enzymes are originated from.

[0161] In microorganisms, phosphoenolpyruvate sugar phosphotransferase enzyme I is encoded by the ptsI gene; phospho carrier protein HPr is encoded by the ptsH gene; glucose-specific enzyme IIA is encoded by the crr gene; and glucose-specific enzymes IIB and IIC are encoded by the ptsG gene.

[0162] The enzyme encoded by the ptsG gene is classified as EC 2.7.1.199 and is called protein-Npi-phosphohistidine-D-glucose phosphotransferase, and examples of the enzyme include PtsG from Escherichia coli strain K-12 substrain MG1655 (NCBI-Protein ID: NP_415619) and PtsG from Serratia grimesii strain NBRC13537 (SEQ ID NO: 185). Whether or not a polypeptide encoded by a certain gene of a microorganism used in the present invention is a PTS enzyme may be determined by BLAST searching on a website, such as that of NCBI or KEGG.

[0163] In the present invention, one or more of the above PTS enzyme genes may be disrupted. Although any of the above PTS enzyme genes may be disrupted, it is desirable to impair an enzyme gene that is involved in glucose uptake, particularly the ptsG gene. Specific examples of the ptsG gene include ptsG from Escherichia coli strain K-12 substrain MG1655 (NCBI-Gene ID: 945651) and ptsG from Serratia grimesii strain NBRC13537 (SEQ ID NO: 243).

[0164] As described above, E. coli is a microorganism that has an ability to produce 3-hydroxyadipic acid and α-hydromuconic acid, and JP 2008-527991 A describes production of a mutant E. coli strain with defects in the pykF and pykA genes, which each encode a pyruvate kinase, and in the ptsG gene, which encodes a phosphotransferase system enzyme, wherein the yield of succinic acid is increased and the yields of acetic acid and ethanol are decreased, by culturing the mutant strain under anaerobic conditions. In this respect, acetic acid and ethanol are compounds generated from the metabolism of acetyl-CoA, as illustrated in the metabolic pathway shown in the above scheme 2. That is, in JP 2008-527991 A, it is presumed that the defects of the ptsG, pykF, and pykA genes in E. coli resulted in a reduced supply of acetyl-CoA and in turn a lower yield of acetic acid and ethanol.

[0165] On the other hand, the 3-hydroxyadipic acid, α-hydromuconic acid, and/or adipic acid produced by the method of the present invention are compounds generated through a plurality of reactions in the metabolism of 3-oxoadipyl-CoA, which is produced from acetyl-CoA and succinyl-CoA by the reaction A, as described above. Accordingly, from the description in JP 2008-527991 A, it is expected that disruption of genes encoding pyruvate kinase and a phosphotransferase system enzyme also results in a decreased yields of 3-hydroxyadipic acid, α-hydromuconic acid, and/or adipic acid due to the reduced supply of acetyl-CoA. However, in the present invention, disruption of genes encoding pyruvate kinase and a phosphotransferase system enzyme increases the yields of 3-hydroxyadipic acid, α-hydromuconic acid, and/or adipic acid and also the yield of acetic acid in a genetically modified microorganism with enhanced activities of phosphoenolpyruvate carboxykinase and of an enzyme that catalyzes the reaction of reducing 3-oxoadipyl-CoA to 3-hydroxyadipyl-CoA, which is contrary to the above expectation.

[0166] The genetically modified microorganism of the present invention is cultured in a culture medium, preferably a liquid culture medium, containing a carbon source available to ordinary microorganisms as a raw material for fermentation. The culture medium used contains, in addition to the carbon source available to the genetically modified microorganism, appropriate amounts of a nitrogen source and inorganic salts, and organic trace nutrients such as amino acids and vitamins as necessary. Either a natural or synthetic culture medium can be used as long as the medium contains the above-described nutrients.

[0167] The material for fermentation is a material that can be metabolized by the genetically modified microorganism. The term “metabolize” refers to conversion of a chemical substance, which a microorganism has taken up from the extracellular environment or intracellularly generated from a different chemical substance, to another chemical substance through an enzymatic reaction. Sugars can be suitably used as the carbon source. Specific examples of the sugars include monosaccharides, such as glucose, sucrose, fructose, galactose, mannose, xylose, and arabinose; disaccharides and polysaccharides formed by linking these monosaccharides; and saccharified starch solution, molasses, and saccharified solution from cellulose-containing biomass, each containing any of those saccharides.

[0168] The above-listed carbon sources may be used individually or in combination. However, it is especially preferred that the genetically modified microorganism be cultured in a culture medium containing glucose. In the addition of a carbon source, the concentration of the carbon source in a culture medium is not specifically limited and can be appropriately set depending on the type of the carbon source. The concentration is preferably from 5 g/L to 300 g/L in the case of glucose.

[0169] As the nitrogen source used for culturing the genetically modified microorganism, for example, ammonia gas, aqueous ammonia, ammonium salts, urea, nitric acid salts, other supportively used organic nitrogen sources, such as oil cakes, soybean hydrolysate, casein degradation products, other amino acids; vitamins, corn steep liquor, yeast or yeast extract, meat extract, peptides such as peptone, and bacterial cells and hydrolysate of various fermentative bacteria can be used. The concentration of the nitrogen source in the culture medium is not particularly limited, and is preferably from 0.1 g/L to 50 g/L.

[0170] As the inorganic salts used for culturing the genetically modified microorganism, for example, phosphoric acid salts, magnesium salts, calcium salts, iron salts, and manganese salts can be appropriately added to the culture medium and used.

[0171] The culture conditions for the genetically modified microorganism to produce 3-hydroxyadipic acid, α-hydromuconic acid, and/or adipic acid are set by appropriately adjusting or selecting, for example, the culture medium with the above composition, culture temperature, stirring speed, pH, aeration rate, and inoculation amount, depending on, for example, the species of the genetically modified microorganism and external conditions.

[0172] The pH range of the culture is not specifically limited, as long as the genetically modified microorganism can be grown in the pH range. However, the pH range is preferably from pH 5 to 8, more preferably from pH 5.5 to 6.8.

[0173] Although the range of aeration rates in the culture is not specifically limited, as long as 3-hydroxyadipic acid, α-hydromuconic acid, and/or adipic acid can be produced under the aeration conditions, it is preferred that oxygen remain in the gaseous phase and/or liquid phase in a culture container for good growth of the mutant microorganism at least at the start of incubation.

[0174] In cases where foam is formed in a liquid culture, an antifoaming agent such as a mineral oil, silicone oil, or surfactant may be appropriately added to the culture medium.

[0175] After a recoverable amount of 3-hydroxyadipic acid, α-hydromuconic acid, and/or adipic acid is produced during culturing of the microorganism, the produced products can be recovered. The produced products can be recovered, for example isolated, according to a commonly used method, in which the culturing is stopped once a product of interest is accumulated to an appropriate level, and the fermentation product is collected from the culture. Specifically, the products can be isolated from the culture by separation of bacterial cells through, for example, centrifugation or filtration prior to, for example, column chromatography, ion exchange chromatography, activated charcoal treatment, crystallization, membrane separation, or distillation. More specifically, examples include, but are not limited to, a method in which an acidic component is added to salts of the products, and the resulting precipitate is collected; a method in which water is removed from the culture by concentration using, for example, a reverse osmosis membrane or an evaporator to increase the concentrations of the products and the products and/or salts of the products are then crystallized and precipitated by cooling or adiabatic crystallization to recover the crystals of the products and/or salts of the products by, for example, centrifugation or filtration; and a method in which an alcohol is added to the culture to produce esters of the products and the resulting esters of the products are subsequently collected by distillation and then hydrolyzed to recover the products. These recovery methods can be appropriately selected and optimized depending on, for example, physical properties of the products.

### EXAMPLES

[0176] The present invention will be specifically described below with reference to examples.

### Reference Example 1

[0177] Production of Plasmids Each Expressing an Enzyme Catalyzing a Reaction to Generate 3-Oxoadipyl-CoA and Coenzyme A (the Reaction A), an Enzyme Catalyzing a Reaction to Generate 3-Hydroxyadipic Acid from 3-Hydroxyadipyl-CoA (the Reaction E) and a Reaction to Generate α-Hydromuconic Acid from 2,3-Dehydroadipyl-CoA (the Reaction F), and a Polypeptide Represented by SEQ ID NO: 1, 2, 3, 4, 5, 6, or 7

[0178] The pBBR1MCS-2 vector, which is capable of autonomous replication in E. coli (ME Kovach, (1995), Gene 166: 175-176), was cleaved with XhoI to obtain pBBR1MCS-2/XhoI. To integrate a constitutive expression promoter into the vector, primers (SEQ ID NOs: 187 and 188) were designed to amplify an upstream 200-b region (SEQ ID NO: 186) of gapA (NCBI Gene ID: NC_000913.3) by PCR using the genomic DNA of Escherichia coli K-12 MG1655 as a template, and a PCR reaction was performed in accordance with routine procedures. The obtained fragment and pBBR1MCS-2/XhoI were ligated together using the In-Fusion HD Cloning Kit (manufactured by Takara Bio Inc.), and the resulting plasmid was introduced into E. coli strain DH5a. The nucleotide sequence on the plasmid isolated from the obtained recombinant E. coli strain was confirmed in accordance with routine procedures, and the plasmid was designated as pBBR1MCS-2::Pgap. Then, the pBBR1MCS-2::Pgap was cleaved with ScaI to obtain pBBR1MCS-2::Pgap/ScaI. For amplification of a gene encoding an enzyme catalyzing the reaction A, primers (SEQ ID NOs: 190 and 191) were designed to amplify the full length of the acyl transferase gene pcaF (NCBI Gene ID: 1041755, SEQ ID NO: 189) by PCR using the genomic DNA of Pseudomonas putida strain KT2440 as a template, and a PCR reaction was performed in accordance with routine procedures. The obtained fragment and the pBBR1MCS-2::Pgap/ScaI were ligated together using the In-Fusion HD Cloning Kit, and the resulting plasmid was introduced into E. coli strain DH5α. The nucleotide sequence on the plasmid isolated from the obtained recombinant strain was confirmed in accordance with routine procedures, and the plasmid was designated as pBBR1MCS-2::AT. Then, the pBBR1MCS-2::AT was cleaved with HpaI to obtain pBBR1MCS-2::AT/HpaI. For amplification of a gene encoding an enzyme catalyzing the reactions D and E, primers (SEQ ID NOs: 194 and 195) were designed to amplify a continuous sequence including the full lengths of genes together encoding a CoA transferase, pcaI and pcaJ (NCBI Gene IDs: 1046613 and 1046612, SEQ ID NOs: 192 and 193) by PCR using the genomic DNA of Pseudomonas putida strain KT2440 as a template, and a PCR reaction was performed in accordance with routine procedures. The obtained fragment and the pBBR1MCS-2::AT/HpaI were ligated together using the In-Fusion HD Cloning Kit, and the resulting plasmid was introduced into E. coli strain DH5a. The nucleotide sequence on the plasmid isolated from the obtained recombinant strain was confirmed in accordance with routine procedures, and the plasmid was designated as pBBR1MCS-2::ATCT.

[0179] The pBBR1MCS-2::ATCT was cleaved with ScaI to obtain pBBR1MCS-2::ATCT/ScaI. For amplification of a nucleic acid encoding a polypeptide represented by SEQ ID NO: 1, primers (SEQ ID NOs: 196 and 197) were designed to amplify the nucleic acid represented by SEQ ID NO: 87 through PCR using the genomic DNA of Serratia marcescens strain ATCC13880 as a template, and a PCR reaction was performed in accordance with routine procedures. For amplification of a nucleic acid encoding a polypeptide represented by SEQ ID NO: 2, primers (SEQ ID NOs: 198 and 199) were designed to amplify the nucleic acid represented by SEQ ID NO: 88 through PCR using the genomic DNA of Serratia nematodiphila strain DSM21420 as a template, and a PCR reaction was performed in accordance with routine procedures. For amplification of a nucleic acid encoding a polypeptide represented by SEQ ID NO: 3, primers (SEQ ID NOs: 200 and 201) were designed to amplify the nucleic acid represented by SEQ ID NO: 89 through PCR using the genomic DNA of Serratia plymuthica strain NBRC102599 as a template, and a PCR reaction was performed in accordance with routine procedures. For amplification of a nucleic acid encoding a polypeptide represented by SEQ ID NO: 4, primers (SEQ ID NOs: 202 and 203) were designed to amplify the nucleic acid represented by SEQ ID NO: 90 through PCR using the genomic DNA of Serratia proteamaculans strain 568 as a template, and a PCR reaction was performed in accordance with routine procedures. For amplification of a nucleic acid encoding a polypeptide represented by SEQ ID NO: 5, primers (SEQ ID NOs: 204 and 205) were designed to amplify the nucleic acid represented by SEQ ID NO: 91 through PCR using the genomic DNA of Serratia ureilytica strain Lr5/4 as a template, and a PCR reaction was performed in accordance with routine procedures. For amplification of a nucleic acid encoding a polypeptide represented by SEQ ID NO: 6, primers (SEQ ID NOs: 206 and 207) were designed to amplify the nucleic acid represented by SEQ ID NO: 92 through PCR using the genomic DNA of Serratia sp. strain BW106 as a template, and a PCR reaction was performed in accordance with routine procedures. For amplification of a nucleic acid encoding a polypeptide represented by SEQ ID NO: 7, primers (SEQ ID NOs: 208 and 209) were designed to amplify the nucleic acid represented by SEQ ID NO: 93 through PCR using the genomic DNA of Serratia liquefaciens strain FK01 as a template, and a PCR reaction was performed in accordance with routine procedures. Each of the obtained fragments and the pBBR1MCS-2::ATCT/ScaI were ligated together using the In-Fusion HD Cloning Kit (manufactured by Takara Bio Inc.), and each of the resulting plasmids was introduced into E. coli strain DH5α. The nucleotide sequence on the plasmid isolated from each of the obtained recombinant strains was confirmed in accordance with routine procedures.

[0180] The plasmid for expression of the polypeptide represented by SEQ ID NO: 1 was designated as “pBBR1MCS-2::ATCTOR1”; the plasmid for expression of the polypeptide represented by SEQ ID NO: 2 was designated as “pBBR1MCS-2::ATCTOR2”; the plasmid for expression of the polypeptide represented by SEQ ID NO: 3 was designated as “pBBR1MCS-2::ATCTOR3”; the plasmid for expression of the polypeptide represented by SEQ ID NO: 4 was designated as “pBBR1MCS-2::ATCTOR4”; the plasmid for expression of the polypeptide represented by SEQ ID NO: 5 was designated as “pBBR1MCS-2::ATCTOR5”; the plasmid for expression of the polypeptide represented by SEQ ID NO: 6 was designated as “pBBR1MCS-2::ATCTOR6”; and the plasmid for expression of the polypeptide represented by SEQ ID NO: 7 was designated as “pBBR1MCS-2::ATCTOR7”; and these plasmids are listed in Table 4.

TABLE 4

| | Originating | | SEQ |
|---|---|---|---|
| Plasmid | organism | Gene ID | ID NO: |
| pBBR1MCS- | Serratia marcescens | JMPQ01000047.1 | 87 |
| 2::ATCTOR1 | ATCC 13880 | | |
| pBBR1MCS- | Serratia | JPUX00000000.1 | 88 |
| 2::ATCTOR2 | nematodiphila | | |
| | DSM21420 | | |
| pBBR1MCS- | Serratia plymuthica | BCTU01000013.1 | 89 |
| 2::ATCTOR3 | NBRC102599 | | |
| pBBR1MCS- | Serratia | CP000826.1 | 90 |
| 2::ATCTOR4 | proteamaculans 568 | | |
| pBBR1MCS- | Serratia | JSFB01000001 | 91 |
| 2::ATCTOR5 | ureilytica Lr5/4 | | |
| pBBR1MCS- | Serratia sp. | MCGS01000002.1 | 92 |
| 2::ATCTOR6 | BW106 | | |
| pBBR1MCS- | Serratia | CP006252.1 | 93 |
| 2::ATCTOR7 | liquefaciens FK01 | | |

### Reference Example 2

[0181] Production of a Plasmid for Expression of an Enzyme Catalyzing a Reaction to Generate 2,3-Dehydroadipyl-CoA from 3-Hydroxyadipyl-CoA (The Reaction C)

[0182] The pMW119 expression vector (manufactured by Nippon Gene Co., Ltd.), which is capable of autonomous replication in E. coli, was cleaved with SacI to obtain pMW119/SacI. To integrate a constitutive expression promoter into the vector, primers (SEQ ID NOs: 210 and 211) were designed to amplify the upstream 200-b region (SEQ ID NO: 186) of gapA (NCBI Gene ID: NC_000913.3) by PCR using the genomic DNA of Escherichia coli K-12 MG1655 as a template, and a PCR reaction was performed in accordance with routine procedures. The obtained fragment and the pMW119/SacI were ligated together using the In-Fusion ID Cloning Kit (manufactured by Takara Bio Inc.), and the resulting plasmid was introduced into E. coli strain DH5α. The nucleotide sequence on the plasmid isolated from the obtained recombinant E. coli strain was confirmed in accordance with routine procedures, and the plasmid was designated as pMW119::Pgap. Then, the pMW119::Pgap was cleaved with SphI to obtain pMW119::Pgap/SphI. For amplification of a gene encoding an enzyme catalyzing the reaction C, primers (SEQ ID NOs: 212 and 213) were designed to amplify the full length of the enoyl-CoA hydratase gene paaF (NCBI Gene ID: 1046932, SEQ ID NO: 176) by PCR using the genomic DNA of Pseudomonas putida strain KT2440 as a template, and a PCR reaction was performed in accordance with routine procedures. The obtained fragment and the pMW119::Pgap/SphI were ligated together using the In-Fusion HD Cloning Kit (manufactured by Takara Bio Inc.), and the resulting plasmid was introduced into E. coli strain DH5α. The nucleotide sequence on the plasmid isolated from the obtained recombinant strain was confirmed in accordance with routine procedures. The obtained plasmid was designated as “pMW119::EH”.

### Reference Example 3

[0183] Production of Plasmids Each Expressing an Enzyme Catalyzing a Reaction to Generate 3-Oxoadipyl-CoA and Coenzyme a from Acetyl-CoA and Succinyl-CoA (the Reaction A), an Enzyme Catalyzing a Reaction to Generate Adipic Acid from adipyl-CoA (The Reaction G), and a Polypeptide Represented by SEQ ID NO: 1, 2, 3, 4, 5, 6, or 7

[0184] For amplification of a gene encoding an enzyme catalyzing the reaction G, primers (SEQ ID NOs: 241 and 242) were designed to amplify a continuous sequence including the full lengths of genes together encoding a CoA transferase, dcaI and dcaJ (NCBI Gene ID: CR543861.1, SEQ ID NOs: 239 and 240) by PCR using the genomic DNA of Acinetobacter baylyi strain ADP1 as a template, and a PCR reaction was performed in accordance with routine procedures. The obtained fragment and each of the fragments obtained by cutting the pBBR1MCS-2::ATCTOR1, pBBR1MCS-2::ATCTOR2, pBBR1MCS-2::ATCTOR3, pBBR1MCS-2::ATCTOR4, pBBR1MCS-2::ATCTOR5, pBBR1MCS-2::ATCTOR6, and pBBR1MCS-2::ATCTOR7 with HpaI, which were produced in Reference Example 1, were ligated together using the In-Fusion HD Cloning Kit, and each of the resulting plasmids was introduced into E. coli strain DH5α. The nucleotide sequences on the plasmids isolated from the obtained recombinant strains were confirmed in accordance with routine procedures, and the plasmids were designated as pBBR1MCS-2::ATCT2OR1, pBBR1MCS-2::ATCT2OR2, pBBR1MCS-2::ATCT2OR3, pBBR1MCS-2::ATCT2OR4, pBBR1MCS-2::ATCT2OR5, pBBR1MCS-2::ATCT2OR6, and pBBR1MCS-2::ATCT2OR7, respectively.

### Reference Example 4

[0185] Production of a Plasmid for Expression of Enzymes Catalyzing a Reaction to Generate 2,3-Dehydroadipyl-CoA from 3-Hydroxyadipyl-CoA (The Reaction C) and a Reaction to Generate Adipyl-CoA from 2,3-Dehydroadipyl-CoA (The Reaction D)

[0186] The pMW119::EH was cleaved with HindIII to obtain pMW119::EH/HindIII. For amplification of a gene encoding an enzyme catalyzing the reaction D, primers (SEQ ID NOs: 215 and 216) were designed to amplify the full length of dcaA (NCBI-Protein ID: AAL09094.1, SEQ ID NO: 214) from Acinetobacter baylyi strain ADP1 by PCR, and a PCR reaction was performed in accordance with routine procedures. The obtained fragment and the pMW119::EH/HindIII were ligated together using the In-Fusion HD Cloning Kit (manufactured by Takara Bio Inc.), and the resulting plasmid was introduced into E. coli strain DH5α. The nucleotide sequence on the plasmid isolated from the obtained recombinant strain was confirmed in accordance with routine procedures, and the plasmid was designated as pMW119::EHER.

### Reference Example 5

[0187] Production of Plasmids Each Expressing a PEP Carboxykinase, an Enzyme Catalyzing a Reaction to Generate 3-Oxoadipyl-CoA and Coenzyme a (the Reaction A), an Enzyme Catalyzing a Reaction to Generate 3-Hydroxyadipic Acid from 3-Hydroxyadipyl-CoA (The Reaction E) and a Reaction to Generate α-Hydromuconic Acid from 2,3-Dehydroadipyl-CoA (the Reaction F), and a Polypeptide Represented by SEQ ID NO: 1, 2, 3, 4, 5, 6, or 7

[0188] To integrated a promoter for constitutive expression of a PEP carboxykinase, primers (SEQ ID NOs: 217 and 218) were designed to amplify the upstream 200-b region (SEQ ID NO: 186) of gapA (NCBI Gene ID: NC_000913.3) by PCR using the genomic DNA of Escherichia coli K-12 MG1655 as a template, and a PCR reaction was performed in accordance with routine procedures. The obtained fragment and each of the fragments obtained by cutting the pBBR1MCS-2::ATCTOR1, pBBR1MCS-2::ATCTOR2, pBBR1MCS-2::ATCTOR3, pBBR1MCS-2::ATCTOR4, pBBR1MCS-2::ATCTOR5, pBBR1MCS-2::ATCTOR6, and pBBR1MCS-2::ATCTOR7 with SacI, which were produced in Reference Example 1, were ligated together using the In-Fusion HD Cloning Kit, and each of the resulting plasmids was introduced into E. coli strain DH5α. The nucleotide sequences on the plasmids isolated from the obtained recombinant strains were confirmed in accordance with routine procedures, and the plasmids were designated as pBBR1MCS-2::ATCTOR1Pgap, pBBR1MCS-2::ATCTOR2Pgap, pBBR1MCS-2::ATCTOR3Pgap, pBBR1MCS-2::ATCTOR4Pgap, pBBR1MCS-2::ATCTOR5Pgap, pBBR1MCS-2::ATCTOR6Pgap, and pBBR1MCS-2::ATCTOR7Pgap, respectively. Subsequently, to amplify a gene encoding a PEP carboxykinase, primers (SEQ ID NOs: 220 and 221) were designed to amplify a continuous sequence including the full length of a PEP carboxykinase gene (SEQ ID NO: 219) by PCR using the genomic DNA of Serratia grimesii strain NBRC13537 as a template, and a PCR reaction was performed in accordance with routine procedures. The obtained fragment and each of the fragments obtained by cutting the pBBR1MCS-2::ATCTOR1Pgap, pBBR1MCS-2::ATCTOR2Pgap, pBBR1MCS-2::ATCTOR3Pgap, pBBR1MCS-2::ATCTOR4Pgap, pBBR1MCS-2::ATCTOR5Pgap, pBBR1MCS-2::ATCTOR6Pgap, and pBBR1MCS-2::ATCTOR7Pgap with Sac were ligated together using the Tn-Fusion HD Cloning Kit, and each of the resulting plasmids was introduced into E. coli strain DH5α. The nucleotide sequences on the plasmids isolated from the obtained recombinant strains were confirmed in accordance with routine procedures, and the plasmids were designated as pBBR1MCS-2::ATCTOR1PCK, pBBR1MCS-2::ATCTOR2PCK, pBBR1MCS-2::ATCTOR3PCK, pBBR1MCS-2::ATCTOR4PCK, pBBR1MCS-2::ATCTOR5PCK, pBBR1MCS-2::ATCTOR6PCK, and pBBR1MCS-2::ATCTOR7PCK, respectively.

### Reference Example 6

[0189] Production of Plasmids Each Expressing a PEP Carboxykinase, an Enzyme Catalyzing a Reaction to Generate 3-Oxoadipyl-CoA and Coenzyme a from Acetyl-CoA and Succinyl-CoA (the Reaction A), an Enzyme Catalyzing a Reaction to Generate Adipic Acid from Adipyl-CoA (the Reaction G), and a Polypeptide Represented by SEQ ID NO: 1, 2, 3, 4, 5, 6, or 7

[0190] By using the same method and primers as in Reference Example 5, the upstream 200-b region of gapA (NCBI Gene ID: NC_000913.3) obtained using the genomic DNA of Escherichia coli K-12 MG1655 as a template and the PEP carboxykinase gene from Serratia grimesii strain NBRC13537 were inserted into each of the pBBR1MCS-2::ATCT2OR1, pBBR1MCS-2::ATCT2OR2, pBBR1MCS-2::ATCT2OR3, pBBR1MCS-2::ATCT2OR4, pBBR1MCS-2::ATCT2OR5, pBBR1MCS-2::ATCT2OR6, and pBBR1MCS-2::ATCT2OR7 produced in Reference Example 3. The obtained plasmids were designated as pBBR1MCS-2::ATCT2OR1PCK, pBBR1MCS-2::ATCT2OR2PCK, pBBR1MCS-2::ATCT2OR3PCK, pBBR1MCS-2::ATCT2OR4PCK, pBBR1MCS-2::ATCT2OR5PCK, pBBR1MCS-2::ATCT2OR6PCK, and pBBR1MCS-2::ATCT2OR7PCK, respectively.

### Example 1

[0191] Generation of a Mutant Microorganism of the Genus Serratia with Impaired Pyruvate Kinase Function

[0192] Genes encoding the pyruvate kinase of a microorganism of the genus Serratia, pykF and pykA, were disrupted to generate a mutant microorganism of the genus Serratia with impaired pyruvate kinase function.

[0193] The procedure for disrupting pykF and pykA followed the method described in Proc Natl Acad Sci USA., 2000 Jun. 6, 97(12): 6640-6645.

Generation of a Mutant Microorganism of the Genus Serratia Deficient in pykF

[0194] A PCR reaction was performed using pKD4 as a template and oligo DNAs represented by SEQ ID NOs: 222 and 223 as primers to obtain a PCR fragment of 1.6 kb in length for disruption of pykF. A FRT recombinase expression plasmid, pKD46, was introduced into Serratia grimesii strain NBRC13537, and an ampicillin-resistant strain was obtained. The obtained strain was inoculated into 5 mL of LB medium containing 500 μg/mL ampicillin and was cultured at 30° C. with shaking for 1 day. Subsequently, 0.5 mL of the culture fluid was inoculated into 50 mL of LB medium containing 500 μg/mL ampicillin and 50 mM arabinose and was cultured in rotation at 30° C. for 2 hours. The culture fluid was cooled on ice for 20 minutes, and the bacterial cells were then washed with 10% (w/w) glycerol three times. The washed pellet was suspended in 100 μL of 10% (w/w) glycerol and mixed with 5 μL of the PCR fragment, and the mixture was then cooled in an electroporation cuvette on ice for 10 minutes. Electroporation was performed using a Gene Pulser electroporator (manufactured by Bio-Rad Laboratories, Inc.; 3 kV, 200 Ω, 25 μF), and 1 mL of SOC medium was added to the electroporation cuvette immediately after the electroporation, and the bacterial cells in the cuvette were incubated at 30° C. with shaking for 2 hours. The total volume of the culture was applied to LB agar medium containing 25 μg/mL kanamycin and was incubated at 30° C. for 1 day. Colony direct PCR was performed on the resulting kanamycin-resistant strains to confirm the deletion of the gene of interest and the insertion of a kanamycin resistance gene from the length of the amplified band. Oligo DNA primers represented by SEQ ID NOs: 224 and 226 were used.

[0195] Subsequently, one of the kanamycin-resistant strains was inoculated into 5 mL of LB medium and was cultured at 37° C. and passaged twice to segregate away the pKD46 and to obtain an ampicillin-sensitive strain. The plasmid pCP20 was introduced into the ampicillin-sensitive strain, and ampicillin-resistant strains were again obtained. After culturing the obtained strains at 40° C., colony direct PCR was performed on the resulting strains to confirm the deletion of the kanamycin resistance gene from the length of the amplified band. Oligo DNA primers represented by SEQ ID NOs: 225 and 226 were used. Subsequently, one of the kanamycin-sensitive strains was inoculated into 5 mL of LB medium and was cultured at 37° C. and passaged twice to segregate away the pCP20. The obtained strain was designated as Serratia grimesii NBRC13537 ΔpykF.

Generation of a Mutant Microorganism of the Genus Serratia Deficient in pykA

[0196] A PCR reaction was performed using pKD4 as a template and oligo DNAs represented by SEQ ID NOs: 227 and 228 as primers to obtain a PCR fragment of 1.6 kb in length for disruption of pykA.

[0197] By the same method as used for the generation of the pykF-deficient strain, pykA was disrupted in the Serratia grimesii NBRC13537 ΔpykF strain. After the plasmid pKD46 was introduced into the above strain, the PCR fragment used for disruption of pykA was introduced to the resulting strain. Colony direct PCR was performed on the resulting kanamycin-resistant strains to confirm the deletion of the gene of interest and the insertion of a kanamycin resistance gene from the length of the amplified band. Oligo DNA primers represented by SEQ ID NOs: 224 and 230 were used.

[0198] Subsequently, an ampicillin-sensitive strain was obtained by segregating away the pKD46. The plasmid pCP20 was introduced into the ampicillin-sensitive strain, and ampicillin-resistant strains were again obtained. Colony direct PCR was performed on the obtained strains to confirm the deletion of the kanamycin resistance gene from the length of the amplified band. Oligo DNA primers represented by SEQ ID NOs: 229 and 230 were used. The pCP20 was segregated away from one of the kanamycin-sensitive strains. The obtained strain was designated as SgΔPP.

### Example 2

[0199] Generation of Mutant Microorganisms of the Genus Serratia with Impaired Pyruvate Kinase Function and Carrying a Plasmid Expressing a PEP Carboxykinase and Enzymes Catalyzing the Reactions A, B, E, and F

[0200] Each of the plasmids produced in Reference Example 1 was introduced into the SgΔPP produced in Example 1 to generate mutant microorganisms of the genus Serratia.

[0201] The SgΔPP was inoculated into 5 mL of LB medium and cultured at 30° C. with shaking for 1 day. Subsequently, 0.5 mL of the culture fluid was inoculated into 5 mL of LB medium and was cultured at 30° C. with shaking for 2 hours. The culture fluid was cooled on ice for 20 minutes, and the bacterial cells were then washed with 10% (w/w) glycerol three times. The washed pellet was suspended in 100 μL of 10% (w/w) glycerol and mixed with 1 μL of the pBBR1 MCS-2::ATCTOR1PCK, pBBR1MCS-2::ATCTOR2PCK, pBBR1MCS-2::ATCTOR3PCK, pBBR1MCS-2::ATCTOR4PCK, pBBR1MCS-2::ATCTOR5PCK, pBBR1MCS-2::ATCTOR6PCK, or pBBR1MCS-2::ATCTOR7PCK, and the mixture was then cooled in an electroporation cuvette on ice for 10 minutes. Electroporation was performed using a Gene Pulser electroporator (manufactured by Bio-Rad Laboratories, Inc.; 3 kV, 200 Ω, 25 μF), and 1 mL of SOC medium was added to the electroporation cuvette immediately after the electroporation, and the bacterial cells in the cuvette were incubated at 30° C. with shaking for 1 hour. Fifty μL of the culture was applied to LB agar medium containing 25 μg/mL kanamycin and was incubated at 30° C. for 1 day. The obtained strains were designated as SgΔPP/3HA1PCK, SgΔPP/3HA2PCK, SgΔPP/3HA3PCK, SgΔPP/3HA4PCK, SgΔPP/3HA5PCK, SgΔPP/3HA6PCK, and SgΔPP/3HA7PCK, respectively.

### Reference Example 7

[0202] Generation of mutant microorganisms of the genus Serratia with intact pyruvate Kinase Function and Carrying a Plasmid Expressing a PEP Carboxykinase and Enzymes Catalyzing the Reactions A, B, E, and F

[0203] By the same method as in Example 2, the pBBR1MCS-2::ATCTOR1PCK, pBBR1MCS-2::ATCTOR2PCK, pBBR1MCS-2::ATCTOR3PCK, pBBR1MCS-2::ATCTOR4PCK, pBBR1MCS-2::ATCTOR5PCK, pBBR1MCS-2::ATCTOR6PCK, or pBBR1MCS-2::ATCTOR7PCK was introduced into Serratia grimesii NBRC13537. Additionally, a control strain was generated by introducing the pBBR1MCS-2 empty vector into Serratia grimesii NBRC13537. The obtained strains were designated as Sg/3HA1PCK, Sg/3HA2PCK, Sg/3HA3PCK, Sg/3HA4PCK, Sg/3HA5PCK, Sg/3HA6PCK, Sg/3HA7PCK, and Sg/pBBR (negative control), respectively.

### Reference Example 8

[0204] Generation of Mutant Microorganisms of the Genus Serratia with Impaired Pyruvate Kinase Function and Carrying a Plasmid Expressing Enzymes that Catalyze the Reactions A, B, E, and F

[0205] By the same method as in Example 2, the pBBR1MCS-2::ATCTOR1, pBBR1MCS-2::ATCTOR2, pBBR1 MCS-2::ATCTOR3, pBBR1MCS-2::ATCTOR4, pBBR1MCS-2::ATCTOR5, pBBR1MCS-2::ATCTOR6, or pBBR1MCS-2::ATCTOR7 was introduced into the SgΔPP. Additionally, a control strain was generated by introducing the pBBR1MCS-2 empty vector into the SgΔPP. The obtained strains were designated as SgΔPP/3HA1, SgΔPP/3HA2, SgΔPP/3HA3, SgΔPP/311A4. SgΔPP/3HA5, SgΔPP/3HA6, SgΔPP/3HA7, and SgΔPP/pBBR (negative control), respectively.

### Example 3

[0206] Production Test of 3-Hydroxyadipic Acid and α-Hydromuconic Acid Using Mutant Microorganisms of the Genus Serratia with Impaired Pyruvate Kinase Function and with Enhanced PEP Carboxykinase Activity

[0207] The production test of 3-hydroxyadipic acid and α-hydromuconic acid was conducted using the mutant microorganisms of the genus Serratia produced in Example 2.

[0208] A loopful of each mutant produced in Example 2 was inoculated into 5 mL (in a glass test tube of 18-mm diameter with aluminum cap) of the culture medium I (10 g/L Bacto Tryptone (manufactured by Difco Laboratories), 5 g/L Bacto Yeast Extract (manufactured by Difco Laboratories), 5 g/L sodium chloride, 25 μg/mL kanamycin) adjusted to pH 7 and was cultured at 30° C. with shaking at 120 min⁻¹ for 24 hours. Subsequently, 0.25 mL of the culture fluid was added to 5 mL (in a glass test tube of 18-mm diameter with aluminum cap) of the culture medium 11 (50 g/L glucose, 1 g/L ammonium sulfate, 50 mM potassium phosphate, 0.025 g/L magnesium sulfate, 0.0625 mg/L iron sulfate, 2.7 mg/L manganese sulfate, 0.33 mg/L calcium chloride, 1.25 g/L sodium chloride, 2.5 g/L Bacto Tryptone, 1.25 g/L Bacto Yeast Extract, 25 μg/mL kanamycin) adjusted to pH 6.5 and was cultured at 30° C. with shaking at 120 min⁻¹ for 24 hours.

### Quantitative Analysis of Substrate and Product

[0209] The supernatant separated from bacterial cells by centrifugation of each culture fluid was processed by membrane treatment using Millex-GV (0.22 μm; PVDF; manufactured by Merck KGaA), and the resulting filtrate was analyzed by the following methods to quantify the concentrations of 3-hydroxyadipic acid, α-hydromuconic acid, and other products accumulated in the culture supernatant and the concentration of sugars remaining unused in the culture medium. The yields of 3-hydroxyadipic acid and α-hydromuconic acid calculated using the formula (2) below from the measurement results are shown in Table 5.

[0210] A concentration of not more than 0.1 mg/L is considered to be below the detection limit in the quantitative LC-MS/MS analysis and is hereinafter denoted in each table as N.D.

Yield (%)=amount of a generated product (mol)/amount of consumed sugars (mol)×100 Formula (2)

### Quantitative Analysis of 3-Hydroxyadipic Acid and α-Hydromuconic Acid by LC-MS/MS

[0211] HPLC: 1290 Infinity (manufactured by Agilent Technologies, Inc.)

[0212] Column: Synergi hydro-RP (manufactured by Phenomenex Inc.), length: 100 mm, internal diameter: 3 mm, particle size: 2.5 μm

[0213] Mobile phase: 0.1% aqueous formic acid solution/methanol=70/30

[0214] Flow rate: 0.3 mL/min

[0215] Column temperature: 40° C.

[0216] LC detector: 1260DAD VL+(210 nm)

[0217] MS/MS: Triple-Quad LC/MS (manufactured by Agilent Technologies, Inc.) Ionization method: ESI in negative mode.

[0218] Quantitative analysis of organic acids by HPLC

[0219] HPLC:LC-10A (manufactured by Shimadzu Corporation)

[0220] Column: Shim-pack SPR-H (manufactured by Shimadzu GLC Ltd.), length: 250 mm, internal diameter: 7.8 mm, particle size: 8 μm

[0221] Shim-pack SCR-101H (manufactured by Shimadzu GLC Ltd.) length: 250 mm, internal diameter: 7.8 mm, particle size: 10 μm

[0222] Mobile phase: 5 mMp-toluenesulfonic acid

[0223] Reaction solution: 5 mM p-toluenesulfonic acid, 0.1 mM EDTA, 20 mM Bis-Tris

[0224] Flow rate: 0.8 mL/min

[0225] Column temperature: 45° C.

[0226] Detector: CDD-10Avp (manufactured by Shimadzu Corporation)

### Quantitative Analysis of Sugars and Alcohol by HPLC

[0227] HPLC: Shimazu Prominence (manufactured by Shimadzu Corporation)

[0228] Column: Shodex Sugar SH1011 (manufactured by Showa Denko K.K.), length: 300 mm, internal diameter: 8 mm, particle size: 6 μm

[0229] Mobile phase: 0.05M aqueous sulfuric acid solution

[0230] Flow rate: 0.6 mL/min

[0231] Column temperature: 65° C.

[0232] Detector: RID-10A (manufactured by Shimadzu Corporation).

### Comparative Example 1

[0233] Production Test of 3-Hydroxyadipic Acid and α-Hydromuconic Acid Using Mutant Microorganisms of the Genus Serratia with Intact Pyruvate Kinase Function and with Enhanced PEP Carboxykinase Activity

[0234] The mutants produced in Reference Example 7 were cultured in the same manner as in Example 3. The concentrations of 3-hydroxyadipic acid, α-hydromuconic acid, and other products accumulated in the culture supernatant and the concentration of sugars remaining unused in the culture medium were quantified. The yields of 3-hydroxyadipic acid and α-hydromuconic acid calculated using the formula (2) from the measurement results are shown in Table 5.

### Comparative Example 2

[0235] Production Test of 3-Hydroxyadipic Acid and α-Hydromuconic Acid Using Mutant Microorganisms of the Genus Serratia with Impaired Pyruvate Kinase Function and with Unenhanced PEP Carboxykinase Activity

[0236] The mutants produced in Reference Example 8 were cultured in the same manner as in Example 3. The concentrations of 3-hydroxyadipic acid, α-hydromuconic acid, and other products accumulated in the culture supernatant and the concentration of sugars remaining unused in the culture medium were quantified. The yields of 3-hydroxyadipic acid and α-hydromuconic acid calculated using the formula (2) from the measurement results are shown in Table 5.

[0237] By comparing the results of Comparative Examples 1 and 2 with that of Example 3, it was found that the yields of 3-hydroxyadipic acid and α-hydromuconic acid were increased by impairing the function of pyruvate kinase and enhancing the PEP carboxykinase activity in the microorganism of the genus Serratia.

TABLE 5

| | | Yield of 3HA | Yield of HMA |
|---|---|---|---|
| | Strain | (%) | (%) |
| Example 3 | SgΔPP/3HA1PCK | 6.84 | 0.103 |
| | SgΔPP/3HA2 PCK | 7.91 | 0.132 |
| | SgΔPP/3HA3 PCK | 7.43 | 0.148 |
| | SgΔPP/3HA4 PCK | 7.12 | 0.103 |
| | SgΔPP/3HA5 PCK | 7.03 | 0.127 |
| | SgΔPP/3HA6 PCK | 8.13 | 0.149 |
| | SgΔPP/3HA7 PCK | 6.70 | 0.127 |
| Comparative | Sg/pBBR | N.D. | N.D. |
| Example 1 | Sg/3HA1 PCK | 0.568 | 0.0206 |
| | Sg/3HA2 PCK | 0.857 | 0.0336 |
| | Sg/3HA3 PCK | 0.684 | 0.0330 |
| | Sg/3HA4 PCK | 0.635 | 0.0298 |
| | Sg/3HA5 PCK | 0.733 | 0.0290 |
| | Sg/3HA6 PCK | 0.750 | 0.0260 |
| | Sg/3HA7 PCK | 0.685 | 0.0165 |
| Comparative | SgΔPP/pBBR | 0.0362 | 0.0113 |
| Example 2 | SgΔPP/3HA1 | 3.47 | 0.0782 |
| | SgΔPP/3HA2 | 5.78 | 0.0960 |
| | SgΔPP/3HA3 | 5.24 | 0.0846 |
| | SgΔPP/3HA4 | 5.10 | 0.0909 |
| | SgΔPP/3HA5 | 6.21 | 0.107 |
| | SgΔPP/3HA6 | 6.28 | 0.103 |
| | SgΔPP/3HA7 | 4.96 | 0.0638 |

### Example 4

[0238] Generation of an E. coli Mutant with Impaired Pyruvate Kinase Function

[0239] Genes encoding the pyruvate kinase of E. coli, pykF and pykA, were disrupted to generate an E. coli mutant with impaired pyruvate kinase function. The procedure for disrupting pykF and pykA followed the method described in Proc Natl Acad Sci USA., 2000 Jun. 6, 97(12): 6640-6645.

Generation of an E. Co/i Mutant Deficient in pykF

[0240] A PCR reaction was performed using pKD4 as a template and oligo DNAs represented by SEQ ID NOs: 231 and 232 as primers to obtain a PCR fragment of 1.6 kb in length for disruption of pykF.

[0241] A FRT recombinase expression plasmid, pKD46, was introduced into Escherichia coli strain MG1655, and an ampicillin-resistant strain was obtained. The obtained strain was inoculated into 5 mL of LB medium containing 100 μg/mL ampicillin and cultured at 30° C. with shaking for 1 day. Subsequently, 0.5 mL of the culture fluid was inoculated into 50 mL of LB medium containing 100 μg/mL ampicillin and 50 mM arabinose and was cultured in rotation at 30° C. for 2 hours. The culture fluid was cooled on ice for 20 minutes, and the bacterial cells were then washed with 10% (w/w) glycerol three times. The washed pellet was suspended in 100 μL of 10% (w/w) glycerol and mixed with 5 μL of the PCR fragment, and the mixture was then cooled in an electroporation cuvette on ice for 10 minutes. Electroporation was performed using a Gene Pulser electroporator (manufactured by Bio-Rad Laboratories, Inc.; 3 kV, 200 Ω, 25 μF), and 1 mL of SOC medium was added to the electroporation cuvette immediately after the electroporation, and the bacterial cells in the cuvette were incubated at 30° C. with shaking for 2 hours. The total volume of the culture was applied to LB agar medium containing 25 μg/mL kanamycin and was incubated at 30° C. for 1 day. Colony direct PCR was performed on the resulting kanamycin-resistant strains to confirm the deletion of the gene of interest and the insertion of a kanamycin resistance gene from the length of the amplified band. Oligo DNA primers represented by SEQ ID NOs: 224 and 234 were used.

[0242] Subsequently, one of the kanamycin-resistant strains was inoculated into 5 mL of LB medium and was cultured at 37° C. and passaged twice to segregate away the pKD46 and to obtain an ampicillin-sensitive strain. The plasmid pCP20 was introduced into the ampicillin-sensitive strain, and ampicillin-resistant strains were again obtained. After culturing the obtained strains at 40° C., colony direct PCR was performed on the resulting strains to confirm the deletion of the kanamycin resistance gene from the length of the amplified band. Oligo DNA primers represented by SEQ ID NOs: 233 and 234 were used. Subsequently, one of the kanamycin-sensitive strains was inoculated into 5 mL of LB medium and was cultured at 37° C. and passaged twice to segregate away the pCP20. The obtained strain was designated as Escherichia coli MG1655 ΔpykF.

Generation of an E. coli Mutant Deficient in pykA

[0243] A PCR reaction was performed using pKD4 as a template and oligo DNAs represented by SEQ ID NOs: 235 and 236 as primers to obtain a PCR fragment of 1.6 kb in length for disruption of pykA.

[0244] By the same method as used for the generation of the pykF-deficient strain, pykA was disrupted in the Escherichia coli MG1655 ΔpykF strain. After the plasmid pKD46 was introduced into the above strain, the PCR fragment used for disruption of pykA was introduced to the resulting strain. Colony direct PCR was performed on the resulting kanamycin-resistant strains to confirm the deletion of the gene of interest and the insertion of a kanamycin resistance gene from the length of the amplified band. Oligo DNA primers represented by SEQ ID NOs: 224 and 238 were used.

[0245] Subsequently, an ampicillin-sensitive strain was obtained by segregating away the pKD46. The plasmid pCP20 was introduced into the ampicillin-sensitive strain, and ampicillin-resistant strains were again obtained. Colony direct PCR was performed on the obtained strains to confirm the deletion of the kanamycin resistance gene from the length of the amplified band. Oligo DNA primers represented by SEQ ID NOs: 237 and 238 were used. The pCP20 was segregated away from one of the kanamycin-sensitive strains. The obtained strain was designated as FcΔPP.

### Example 5

[0246] Generation of E. coli Mutants with Impaired Pyruvate Kinase Function and Carrying a Plasmid Expressing a PEP Carboxykinase and Enzymes Catalyzing the Reactions A, B, E, and F

[0247] Each of the plasmids produced in Reference Example 1 was introduced into the EcΔPP produced in Example 4 to generate E. coli mutants.

[0248] The EcΔPP was inoculated into 5 mL of LB medium and cultured at 30° C. with shaking for 1 day. Subsequently, 0.5 mL of the culture fluid was inoculated into 5 mL of LB medium and was cultured at 30° C. with shaking for 2 hours. The culture fluid was cooled on ice for 20 minutes, and the bacterial cells were then washed with 10% (w/w) glycerol three times. The washed pellet was suspended in 100 μL of 10% (w/w) glycerol and mixed with 1 μL of the pBBR1MCS-2::ATCTOR1PCK, pBBR1MCS-2::ATCTOR2PCK, pBBR1MCS-2::ATCTOR3PCK, pBBR1MCS-2::ATCTOR4PCK, pBBR1MCS-2::ATCTOR5PCK, pBBR1MCS-2::ATCTOR6PCK, or pBBR1MCS-2::ATCTOR7PCK, and the mixture was then cooled in an electroporation cuvette on ice for 10 minutes. Electroporation was performed using a Gene Pulser electroporator (manufactured by Bio-Rad Laboratories, Inc.; 3 kV, 200 Ω, 25 μF), and 1 mL of SOC medium was added to the electroporation cuvette immediately after the electroporation, and the bacterial cells in the cuvette were incubated at 30° C. with shaking for 1 hour. Fifty μL of the culture was applied to LB agar medium containing 25 μg/mL kanamycin and was incubated at 30° C. for 1 day. The obtained strains were designated as EcΔPP/3HA1PCK, EcΔPP/3HA2PCK, EcΔPP/3HA3PCK, EcΔPP/3HA4PCK, EcΔPP/3HA5PCK, EcΔPP/3HA6PCK, and EcΔPP/3HA7PCK, respectively.

### Reference Example 9

[0249] Generation of E. coli Mutants with Intact Pyruvate Kinase Function and Carrying a Plasmid Expressing a PEP Carboxykinase and Enzymes Catalyzing the Reactions A, B, E, and F

[0250] By the same method as in Example 5, the pBBR1MCS-2::ATCTOR1PCK, pBBR1MCS-2::ATCTOR2PCK, pBBR1MCS-2::ATCTOR3PCK, pBBR1MCS-2::ATCTOR4PCK, pBBR1MCS-2::ATCTOR5PCK, pBBR1MCS-2::ATCTOR6PCK, or pBBR1MCS-2::ATCTOR7PCK was introduced into Escherichia coli MG1655. Additionally, a control strain was generated by introducing the pBBR1MCS-2 empty vector into Escherichia coli MG1655. The obtained strains were designated as Ec/3HA1PCK, Ec/3HA2PCK, Ec/3HA3PCK, Ec/3HA4PCK, Ec/3HA5PCK, Ec/3HA6PCK, Ec/3HA7PCK, and Ec/pBBR (negative control), respectively.

### Reference Example 10

[0251] Generation of E. coli Mutants with Impaired Pyruvate Kinase Function and Carrying a Plasmid Expressing Enzymes that Catalyze the Reactions A, B, E, and F

[0252] By the same method as in Example 5, the pBBR1MCS-2::ATC1′OR1, pBBR1MCS-2::ATCTOR2, pBBR1MCS-2::ATCTOR3, pBBR1MCS-2::ATCTOR4, pBBR1MCS-2::ATCTOR5, pBBR1MCS-2::ATCTOR6, or pBBR1MCS-2::ATCTOR7 was introduced into EcΔPP. Additionally, a control strain was generated by introducing the pBBR1MCS-2 empty vector into the EcΔPP. The obtained strains were designated as EcΔPP/3HA1, EcΔPP/3HA2, EcΔPP/3HA3, EcΔPP/3HA4, EcΔPP/3HA5, EcΔPP/3HA6, EcΔPP/3HA7, and EcΔPP/pBBR (negative control), respectively.

### Example 6

[0253] Production Test of 3-Hydroxyadipic Acid and α-Hydromuconic Acid Using E. coli Mutants with Impaired Pyruvate Kinase Function and with Enhanced PEP Carboxykinase Activity

[0254] The mutants produced in Example 5 were cultured in the same manner as in Example 3. The concentrations of 3-hydroxyadipic acid, α-hydromuconic acid, and other products accumulated in the culture supernatant and the concentration of sugars remaining unused in the culture medium were quantified. The yields of 3-hydroxyadipic acid and α-hydromuconic acid calculated using the above formula (2) from the measured values are shown in Table 6.

### Comparative Example 3

[0255] Production Test of 3-Hydroxyadipic Acid and α-Hydromuconic Acid Using E. coli Mutants with Intact Pyruvate Kinase Function and with Enhanced PEP Carboxykinase Activity

[0256] The mutants produced in Reference Example 9 were cultured in the same manner as in Example 3. The concentrations of 3-hydroxyadipic acid, α-hydromuconic acid, and other products accumulated in the culture supernatant and the concentration of sugars remaining unused in the culture medium were quantified. The yields of 3-hydroxyadipic acid and α-hydromuconic acid calculated using the above formula (2) from the measured values are shown in Table 6.

### Comparative Example 4

[0257] Production Test of 3-Hydroxyadipic Acid and α-Hydromuconic Acid Using E. coli Mutants with Impaired Pyruvate Kinase Function and with Unenhanced PEP Carboxykinase Activity

[0258] The mutants produced in Reference Example 10 were cultured in the same manner as in Example 3. The concentrations of 3-hydroxyadipic acid. α-hydromuconic acid, and other products accumulated in the culture supernatant and the concentration of sugars remaining unused in the culture medium were quantified. The yields of 3-hydroxyadipic acid and α-hydromuconic acid calculated using the formula (2) from the measurement results are shown in Table 6.

[0259] By comparing the results of Comparative Examples 3 and 4 with that of Example 6, it was found that the yields of 3-hydroxyadipic acid and α-hydromuconic acid were increased by impairing the function of pyruvate kinase and enhancing the PEP carboxykinase activity in E. coli.

TABLE 6

| | | Yield of 3HA | Yield of HMA |
|---|---|---|---|
| | Strain | (%) | (%) |
| Example 5 | EcΔPP/3HA1PCK | 4.76 | 0.0370 |
| | EcΔPP/3HA2 PCK | 5.31 | 0.0380 |
| | EcΔPP/3HA3 PCK | 4.35 | 0.0323 |
| | EcΔPP/3HA4 PCK | 4.60 | 0.0375 |
| | EcΔPP/3HA5 PCK | 5.14 | 0.0389 |
| | EcΔPP/3HA6 PCK | 5.54 | 0.0389 |
| | EcΔPP/3HA7 PCK | 4.65 | 0.0362 |
| Comparative | Ec/pBBR | N.D. | N.D. |
| Example 3 | Ec/3HA1 PCK | 1.08 | 0.0124 |
| | Ec/3HA2 PCK | 1.91 | 0.0116 |
| | Ec/3HA3 PCK | 2.15 | 0.0124 |
| | Ec/3HA4 PCK | 1.44 | 0.0147 |
| | Ec/3HA5 PCK | 1.72 | 0.0109 |
| | Ec/3HA6 PCK | 1.86 | 0.0148 |
| | Ec/3HA7 PCK | 1.34 | 0.0117 |
| Comparative | EcΔPP/pBBR | 0.0427 | 0.0132 |
| Example 4 | EcΔPP/3HA1 | 2.54 | 0.0292 |
| | EcΔPP/3HA2 | 3.97 | 0.0333 |
| | EcΔPP/3HA3 | 3.64 | 0.0273 |
| | EcΔPP/3HA4 | 2.86 | 0.0257 |
| | EcΔPP/3HA5 | 3.67 | 0.0269 |
| | EcΔPP/3HA6 | 3.57 | 0.0348 |
| | EcΔPP/3HA7 | 3.13 | 0.0274 |

### Example 7

[0260] Generation of Mutant Microorganisms of the Genus Serratia with Impaired Pyruvate Kinase Function and Carrying Plasmids Expressing a PEP Carboxykinase and Enzymes Catalyzing the Reactions a, B, C, E, and F

[0261] The plasmid pMW119::EH produced in Reference Example 2 was introduced into each mutant microorganism of the genus Serratia produced in Example 2 to generate mutant microorganisms of the genus Serratia.

[0262] The SgΔPP/3HA1PCK, SgΔPP/3HA2PCK, SgΔPP/3HA3PCK, SgΔPP/3HA4PCK, SgΔPP/3HA5PCK, SgΔPP/3HA6PCK, or SgΔPP/3HA7PCK was inoculated into 5 mL of LB medium containing 25 μg/mL kanamycin and cultured at 30° C. with shaking for 1 day. Subsequently, 0.5 mL of the culture fluid was inoculated into 5 mL of LB medium containing 25 μg/mL kanamycin and was cultured at 30° C. with shaking for 2 hours. The culture fluid was cooled on ice for 20 minutes, and the bacterial cells were then washed with 10% (w/w) glycerol three times. The washed pellet was suspended in 100 μL of 10% (w/w) glycerol and mixed with 1 μL of the pMW19::EH, and the mixture was then cooled in an electroporation cuvette on ice for 10 minutes. Electroporation was performed using a Gene Pulser electroporator (manufactured by Bio-Rad Laboratories, Inc.; 3 kV, 200 Ω, 25 μF), and 1 mL of SOC medium was added to the electroporation cuvette immediately after the electroporation, and the bacterial cells in the cuvette were incubated at 30° C. with shaking for 1 hour. Fifty μL of the culture was applied to LB agar medium containing 500 μg/mL ampicillin and 25 μg/mL kanamycin and was incubated at 30° C. for 1 day. The obtained strains were designated as SgΔPP/HMA1PCK, SgΔPP/HMA2PCK, SgΔPP/HMA3PCK, SgΔPP/HMA4PCK, SgΔPP/HMA5PCK, SgΔPP/HMA6PCK, and SgΔPP/HMA7PCK, respectively.

### Reference Example 11

[0263] Generation of Mutant Microorganisms of the Genus Serratia with Intact Pyruvate Kinase Function and Carrying Plasmids Expressing a PEP Carboxykinase and Enzymes Catalyzing the Reactions A, B, C, E, and F

[0264] By the same method as in Example 7, the pMW119::EH was introduced into the Sg/3HA1PCK, Sg/3HA2PCK, Sg/3HA3PCK, Sg/3HA4PCK, Sg/3HA5PCK, Sg/3HA6PCK, or Sg/3HA7PCK. Additionally, a control strain was generated by introducing the pMW119 empty vector into the Sg/pBBR. The obtained strains were designated as Sg/HMA1PCK. Sg/HMA2PCK, Sg/HMA3PCK, Sg/HMA4PCK, Sg/HMA5PCK, Sg/HMA6PCK, Sg/HMA7PCK, and Sg/pBBRpMW (negative control), respectively.

### Reference Example 12

[0265] Generation of Mutant Microorganisms of the Genus Serratia with Impaired Pyruvate Kinase Function and Carrying Plasmids Expressing Enzymes that Catalyze the Reactions A, B, C, E, and F

[0266] By the same method as in Example 7, the pMW19::EH was introduced into the SgΔPP/3HA1, SgΔPP/3HA2, SgΔPP/3HA3, SgΔPP/3HA4, SgΔPP/3HA5, SgΔPP/3HA6, or SgΔPP/3HA7. Additionally, a control strain was generated by introducing the pMW119 empty vector into the SgΔPP/pBBR. The obtained strains were designated as SgΔPP/HMA1, SgΔPP/HMA2, SgΔPP/HMA3, SgΔPP/HMA4, SgΔPP/HMA5, SgΔPP/HMA6, SgΔPP/HMA7, and SgΔPP/pBBRpMW (negative control), respectively.

### Example 8

[0267] Production Test of α-Hydromuconic Acid Using Mutant Microorganisms of the Genus Serratia with Impaired Pyruvate Kinase Function and with Enhanced PEP Carboxykinase Activity

[0268] The mutants produced in Example 7 were cultured in the same manner as in Example 3, except that ampicillin was added to the culture medium to a final concentration of 500 μg/mL. The concentrations of α-hydromuconic acid and other products accumulated in the culture supernatant and the concentration of sugars remaining unused in the culture medium were quantified. The yield of α-hydromuconic acid calculated using the formula (2) from the measured values is shown in Table 7.

### Comparative Example 5

[0269] Production Test of α-Hydromuconic Acid Using Mutant Microorganisms of the Genus Serratia with Intact Pyruvate Kinase Function and with Enhanced PEP Carboxykinase Activity

[0270] The mutants produced in Reference Example 11 were cultured in the same manner as in Example 8. The concentrations of α-hydromuconic acid and other products accumulated in the culture supernatant and the concentration of sugars remaining unused in the culture medium were quantified. The yield of α-hydromuconic acid calculated using the formula (2) from the measured values is shown in Table 7.

### Comparative Example 6

[0271] Production Test of α-Hydromuconic Acid Using Mutant Microorganisms of the Genus Serratia with Impaired Pyruvate Kinase Function and with Unenhanced PEP Carboxykinase Activity

[0272] The mutants produced in Reference Example 12 were cultured in the same manner as in Example 8. The concentrations of α-hydromuconic acid and other products accumulated in the culture supernatant and the concentration of sugars remaining unused in the culture medium were quantified. The yield of α-hydromuconic acid calculated using the formula (2) from the measurement results is shown in Table 7.

[0273] By comparing the results of Comparative Examples 5 and 6 with that of Example 8, it was found that the yield of α-hydromuconic acid was increased by disrupting the pyruvate kinase gene and enhancing the PEP carboxykinase activity in the microorganism of the genus Serratia.

TABLE 7

| | Strain | Yield of HMA (%) |
|---|---|---|
| Example 8 | SgΔPP/HMA1PCK | 0.182 |
| | SgΔPP/HMA2 PCK | 0.205 |
| | SgΔPP/HMA3 PCK | 0.218 |
| | SgΔPP/HMA4 PCK | 0.221 |
| | SgΔPP/HMA5 PCK | 0.246 |
| | SgΔPP/HMA6 PCK | 0.294 |
| | SgΔPP/HMA7 PCK | 0.216 |
| Comparative | Sg/pBBRpMW | N.D. |
| Example 5 | Sg/HMA1 PCK | 0.0355 |
| | Sg/HMA2 PCK | 0.0420 |
| | Sg/HMA3 PCK | 0.0310 |
| | Sg/HMA4 PCK | 0.0376 |
| | Sg/HMA5 PCK | 0.0423 |
| | Sg/HMA6 PCK | 0.0445 |
| | Sg/HMA7 PCK | 0.0372 |
| Comparative | SgΔPP/pBBRpMW | 0.0119 |
| Example 6 | SgΔPP/HMA1 | 0.156 |
| | SgΔPP/HMA2 | 0.179 |
| | SgΔPP/HMA3 | 0.153 |
| | SgΔPP/HMA4 | 0.118 |
| | SgΔPP/HMA5 | 0.217 |
| | SgΔPP/HMA6 | 0.241 |
| | SgΔPP/HMA7 | 0.140 |

### Example 9

[0274] Generation of E. coli Mutants with Impaired Pyruvate Kinase Function and Carrying Plasmids Expressing a PEP Carboxykinase and Enzymes Catalyzing the Reactions A, B, C, E, and F

[0275] The plasmid pMW119::EH produced in Reference Example 2 was introduced into each of the E. coli mutants produced in Example 5 to generate E. coli mutants.

[0276] The EcΔPP/3HA1 PCK, EcΔPP/3HA2PCK, EcΔPP/3HA3PCK, EcΔPP/3HA4PCK, EcΔPP/3HA5PCK, EcΔPP/3HA6PCK, or EcΔPP/3HA7PCK was inoculated into 5 mL of LB medium containing 25 μg/mL, kanamycin and cultured at 30° C. with shaking for 1 day. Subsequently, 0.5 mL of the culture fluid was inoculated into 5 ml, of LB medium containing 25 μg/mL kanamycin and was cultured at 30° C. with shaking for 2 hours. The culture fluid was cooled on ice for 20 minutes, and the bacterial cells were then washed with 10% (w/w) glycerol three times. The washed pellet was suspended in 100 μL of 10% (w/w) glycerol and mixed with 1 μL of the pMW119::EH, and the mixture was then cooled in an electroporation cuvette on ice for 10 minutes. Electroporation was performed using a Gene Pulser electroporator (manufactured by Bio-Rad Laboratories, Inc.; 3 kV, 200 Ω, 25 μF), and 1 mL of SOC medium was added to the electroporation cuvette immediately after the electroporation, and the bacterial cells in the cuvette were incubated at 30° C. with shaking for 1 hour. Fifty μL of the culture was applied to LB agar medium containing 100 μg/mL ampicillin and 25 μg/mL kanamycin and was incubated at 30° C. for 1 day. The obtained strains were designated as EcΔPP/HMA1PCK, EcΔPP/HMA2PCK, EcΔPP/HMA3PCK, EcΔPP/HMA4PCK, EcΔPP/HMA5PCK, EcΔPP/HMA6PCK, and EcΔPP/HMA7PCK, respectively.

### Reference Example 13

[0277] Generation of E. coli Mutants with Intact Pyruvate Kinase Function and Carrying Plasmids Expressing a PEP Carboxykinase and Enzymes Catalyzing the Reactions A, B, C, E, and F

[0278] By the same method as in Example 9, the pMW119::EH was introduced into the Ec/3HA1PCK, Ec/3HA2PCK, Ec/3HA3PCK, Ec/3HA4PCK, Ec/3HA5PCK, Ec/3HA6PCK, or Ec/3HA7PCK. Additionally, a control strain was generated by introducing the pMW119 empty vector into the Ec/pBBR. The obtained strains were designated as Ec/HMA1PCK, Ec/HMA2PCK, Ec/HMA3PCK, Ec/HMA4PCK, Ec/HMA5PCK, Ec/HMA6PCK, Ec/HMA7PCK, and Ec/pBBRpMW (negative control), respectively.

### Reference Example 14

[0279] Generation of E. coli Mutants with Impaired Pyruvate Kinase Function and Carrying Plasmids Expressing Enzymes that Catalyze the Reactions A, B, C, E, and F

[0280] By the same method as in Example 9, the pMW119::EH was introduced into the EcΔPP/3HA1, EcΔPP/3HA2, EcΔPP/3HA3, EcΔPP/3HA4, EcΔPP/3HA5, EcΔPP/3HA6, or EcΔPP/3HA7. Additionally, a control strain was generated by introducing the pMW119 empty vector into the EcΔPP/pBBR. The obtained strains were designated as EcΔPP/HMA1, EcΔPP/HMA2, EcΔPP/HMA3, EcΔPP/HMA4, EcΔPP/HMA5, EcΔPP/HMA6, EcΔPP/HMA7, and EcΔPP/pBBRpMW (negative control), respectively.

### Example 10

[0281] Production Test of α-Hydromuconic Acid Using E. coli Mutants with Impaired Pyruvate Kinase Function and with Enhanced PEP Carboxykinase Activity

[0282] The mutants produced in Reference Example 9 were cultured in the same manner as in Example 6, except that ampicillin was added to the culture medium to a final concentration of 100 μg/mL. The concentrations of α-hydromuconic acid and other products accumulated in the culture supernatant and the concentration of sugars remaining unused in the culture medium were quantified. The yield of α-hydromuconic acid calculated using the formula (2) from the measured values is shown in Table 8.

### Comparative Example 7

[0283] Production Test of α-Hydromuconic Acid Using F. Coli Mutants with Intact Pyruvate Kinase Function and with Enhanced PEP Carboxykinase Activity

[0284] The mutants produced in Reference Example 13 were cultured in the same manner as in Example 10. The concentrations of α-hydromuconic acid and other products accumulated in the culture supernatant and the concentration of sugars remaining unused in the culture medium were quantified. The yield of α-hydromuconic acid calculated using the formula (2) from the measured values is shown in Table 8.

### Comparative Example 8

[0285] Production Test of α-Hydromuconic Acid Using E. coli Mutants with Impaired Pyruvate Kinase Function and with Unenhanced PEP Carboxykinase Activity

[0286] The mutants produced in Reference Example 14 were cultured in the same manner as in Example 10. The concentrations of α-hydromuconic acid and other products accumulated in the culture supernatant and the concentration of sugars remaining unused in the culture medium were quantified. The yield of α-hydromuconic acid calculated using the formula (2) from the measurement results is shown in Table 8.

[0287] By comparing the results of Comparative Examples 7 and 8 with that of Example 10, it was found that the yield of α-hydromuconic acid was increased by impairing the function of pyruvate kinase and enhancing the PEP carboxykinase activity in E. coli.

TABLE 8

| | Strain | Yield of HMA (%) |
|---|---|---|
| Example 10 | EcΔPP/HMA1PCK | 0.154 |
| | EcΔPP/HMA2 PCK | 0.176 |
| | EcΔPP/HMA3 PCK | 0.174 |
| | EcΔPP/HMA4 PCK | 0.125 |
| | EcΔPP/HMA5 PCK | 0.213 |
| | EcΔPP/HMA6 PCK | 0.214 |
| | EcΔPP/HMA7 PCK | 0.191 |
| Comparative | Ec/pBBRpMW | N.D. |
| Example 7 | Ec/HMA1 PCK | 0.0257 |
| | Ec/HMA2 PCK | 0.0459 |
| | Ec/HMA3 PCK | 0.0409 |
| | Ec/HMA4 PCK | 0.0459 |
| | Ec/HMA5 PCK | 0.0448 |
| | Ec/HMA6 PCK | 0.0462 |
| | Ec/HMA7 PCK | 0.0352 |
| Comparative | EcΔPP/pBBRpMW | 0.0167 |
| Example 8 | EcΔPP/HMA1 | 0.0511 |
| | EcΔPP/HMA2 | 0.0818 |
| | EcΔPP/HMA3 | 0.0717 |
| | EcΔPP/HMA4 | 0.0688 |
| | EcΔPP/HMA5 | 0.0765 |
| | EcΔPP/HMA6 | 0.0761 |
| | EcΔPP/HMA7 | 0.0599 |

### Example 11

[0288] Generation of Mutant Microorganisms of the Genus Serratia with Impaired Pyruvate Kinase Function and Carrying Plasmids Expressing a PEP Carboxykinase and Enzymes

[0289] Catalyzing the Reactions a, B, C, D, and G By the same method as in Example 2, the pBBR1MCS-2::ATCT2OR1PCK, pBBR1MCS-2::ATCT2OR2PCK, pBBR1MCS-2::ATCT2OR3PCK, pBBR1MCS-2::ATCT2OR4PCK, pBBR1MCS-2::ATCT2OR5PCK, pBBR1MCS-2::ATCT2OR6PCK, or pBBR1MCS-2::ATCT2OR7PCK produced in Reference Example 6 was introduced into the SgΔPP. By the same method as in Example 7, the plasmid pMW119::EHER produced in Reference Example 4 was introduced into each of the obtained mutants to generate mutant microorganisms of the genus Serratia. The obtained strains were designated as SgΔPP/ADA1PCK, SgΔPP/ADA2PCK, SgΔPP/ADA3PCK, SgΔPP/ADA4PCK, SgΔPP/ADA5PCK, SgΔPP/ADA6PCK, and SgΔPP/ADA7PCK, respectively.

### Reference Example 15

[0290] Generation of Mutant Microorganisms of the Genus Serratia with Intact Pyruvate Kinase Function and Carrying Plasmids Expressing a PEP Carboxykinase and Enzymes Catalyzing the Reactions A, B, C, D, and G

[0291] By the same method as in Example 2, the pBBR1MCS-2::ATCT2OR1PCK, pBBR1MCS-2::ATCT2OR2PCK, pBBR1MCS-2::ATCT2OR3PCK, pBBR1MCS-2::ATCT2OR4PCK, pBBR1 MCS-2::ATCT2OR5PCK, pBBR1MCS-2::ATCT2OR6PCK, or pBBR1MCS-2::ATCT2OR7PCK produced in Reference Example 6 was introduced into Serratia grimesii NBRC13537. By the same method as in Example 7, the plasmid pMW119::EHER produced in Reference Example 4 was introduced into each of the obtained mutants to generate mutant microorganisms of the genus Serratia. The obtained strains were designated as Sg/ADA1PCK, Sg/ADA2PCK, Sg/ADA3PCK, Sg/ADA4PCK, Sg/ADA5PCK, Sg/ADA6PCK, and Sg/ADA7PCK, respectively.

### Reference Example 16

[0292] Generation of Mutant Microorganisms of the Genus Serratia with Impaired Pyruvate Kinase Function and Carrying Plasmids Expressing Enzymes that Catalyze the Reactions A, B, C, D, and G

[0293] By the same method as in Example 2, the pBBR1MCS-2::ATCT2OR1, pBBR1MCS-2::ATCT2OR2, pBBR1MCS-2::ATCT2OR3, pBBR1MCS-2::ATCT2OR4, pBBR1MCS-2::ATCT2OR5, pBBR1MCS-2::ATCT2OR6, or pBBR1MCS-2::ATCT2OR7 produced in Reference Example 3 was introduced into the SgΔPP. By the same method as in Example 7, the plasmid pMW119::EHER produced in Reference Example 4 was introduced into each of the obtained mutants to generate mutant microorganisms of the genus Serratia. The obtained strains were designated as SgΔPP/ADA1, SgΔPP/ADA2, SgΔPP/ADA3, SgΔPP/ADA4, SgΔPP/ADA5, SgΔPP/ADA6, and SgΔPP/ADA7, respectively.

### Example 12

[0294] Production Test of Adipic Acid Using Mutant Microorganisms of the Genus Serratia with Impaired Pyruvate Kinase Function and with Enhanced PEP Carboxykinase Activity

[0295] The mutants produced in Example 11 were cultured in the same manner as in Example 3, except that ampicillin was added to the culture medium to a final concentration of 500 μg/mL. The concentrations of adipic acid and other products accumulated in the culture supernatant and the concentration of sugars remaining unused in the culture medium were quantified. The quantification of adipic acid was performed using LC-MS/MS under the same conditions for the quantification of 3-hydroxyadipic acid and α-hydromuconic acid. The yield of adipic acid calculated using the formula (2) from the measured values is shown in Table 9.

### Comparative Example 9

[0296] Production Test of Adipic Acid Using Mutant Microorganisms of the Genus Serratia with Intact Pyruvate Kinase Function and with Enhanced PEP Carboxykinase Activity

[0297] The mutants produced in Reference Example 15 and the Sg/pBBRpMW were cultured in the same manner as in Example 12. The concentrations of adipic acid and other products accumulated in the culture supernatant and the concentration of sugars remaining unused in the culture medium were quantified. The yield of adipic acid calculated using the formula (2) from the measured values is shown in Table 9.

### Comparative Example 10

[0298] Production Test of Adipic Acid Using Mutant Microorganisms of the Genus Serratia with Impaired Pyruvate Kinase Function and with Unenhanced PEP Carboxykinase Activity

[0299] The mutants produced in Reference Example 16 and the SgΔPP/pBBRpMW were cultured in the same manner as in Example 12. The concentrations of adipic acid and other products accumulated in the culture supernatant and the concentration of sugars remaining unused in the culture medium were quantified. The yield of adipic acid calculated using the formula (2) from the measurement results is shown in Table 9.

[0300] By comparing the results of Comparative Examples 9 and 10 with that of Example 12, it was found that the yield of adipic acid was increased by impairing the function of pyruvate kinase and enhancing the PEP carboxykinase activity in the microorganism of the genus Serratia.

TABLE 9

| | Strain | Yield of ADA (%) |
|---|---|---|
| Example 12 | SgΔPP/ADA1PCK | 0.170 |
| | SgΔPP/ADA 2 PCK | 0.187 |
| | SgΔPP/ADA 3 PCK | 0.176 |
| | SgΔPP/ADA 4 PCK | 0.168 |
| | SgΔPP/ADA 5 PCK | 0.172 |
| | SgΔPP/ADA 6 PCK | 0.205 |
| | SgΔPP/ADA 7 PCK | 0.159 |
| Comparative | Sg/pBBRpMW | N.D. |
| Example 9 | Sg/ADA 1 PCK | 0.0170 |
| | Sg/ADA 2 PCK | 0.0229 |
| | Sg/ADA 3 PCK | 0.0177 |
| | Sg/ADA 4 PCK | 0.0171 |
| | Sg/ADA 5 PCK | 0.0221 |
| | Sg/ADA 6 PCK | 0.0185 |
| | Sg/ADA 7 PCK | 0.0203 |
| Comparative | SgΔPP/pBBRpMW | N.D. |
| Example 10 | SgΔPP/ADA 1 | 0.0783 |
| | SgΔPP/ADA 2 | 0.110 |
| | SgΔPP/ADA 3 | 0.0861 |
| | SgΔPP/ADA 4 | 0.116 |
| | SgΔPP/ADA 5 | 0.108 |
| | SgΔPP/ADA 6 | 0.136 |
| | SgΔPP/ADA 7 | 0.0958 |

### Example 13

[0301] Generation of E. coli Mutants with Impaired Pyruvate Kinase Function and Carrying Plasmids Expressing a PEP Carboxykinase and Enzymes Catalyzing the Reactions A, B, C, D, and G

[0302] By the same method as in Example 5, the pBBR1MCS-2::ATCT2OR1PCK, pBBR1MCS-2::ATCT2OR2PCK, pBBR1MCS-2::ATCT2OR3PCK, pBBR1MCS-2::ATCT2OR4PCK, pBBR1MCS-2::ATCT2OR5PCK, pBBR1MCS-2::ATCT2OR6PCK, or pBBR1MCS-2::ATCT2OR7PCK produced in Reference Example 6 was introduced into the EcΔPP. By the same method as in Example 9, the plasmid pMW119::EHER produced in Reference Example 4 was introduced into each of the obtained mutants to generate mutants. The obtained strains were designated as EcΔPP/ADA1PCK, EcΔPP/ADA2PCK, EcΔPP/ADA3PCK, EcΔPP/ADA4PCK, EcΔPP/ADA5PCK, EcΔPP/ADA6PCK, and EcΔPP/ADA7PCK, respectively.

### Reference Example 17

[0303] Generation of E. coli Mutants with Intact Pyruvate Kinase Function and Carrying Plasmids Expressing a PEP Carboxykinase and Enzymes Catalyzing the Reactions A, B, C, D, and G

[0304] By the same method as in Example 5, the pBBR1MCS-2::ATCT2OR1PCK, pBBR1MCS-2::ATCT2OR2PCK, pBBR1MCS-2::ATCT2OR3PCK, pBBR1MCS-2::ATCT2OR4PCK, pBBR1MCS-2::ATCT2OR5PCK, pBBR1MCS-2::ATCT2OR6PCK, or pBBR1MCS-2::ATCT2OR7PCK produced in Reference Example 6 was introduced into Escherichia coli MG1655. By the same method as in Example 9, the plasmid pMW119::EHER produced in Reference Example 4 was introduced into each of the obtained mutants to generate mutants. The obtained strains were designated as Ec/ADA1PCK, Ec/ADA2PCK, Ec/ADA3PCK, Ec/ADA4PCK, Ec/ADA5PCK, Ec/ADA6PCK, and Ec/ADA7PCK, respectively.

### Reference Example 18

[0305] Generation of E. coli Mutants with Impaired Pyruvate Kinase Function and Carrying Plasmids Expressing Enzymes that Catalyze the Reactions A, B, C, D, and G

[0306] By the same method as in Example 5, the PBBR1MCS-2::ATCT2OR1, pBBR1MCS-2::ATCT2OR2, pBBR1MCS-2::ATCT2OR3, pBBR1MCS-2::ATCT2OR4, pBBR1MCS-2::ATCT2OR5, pBBR1MCS-2::ATCT2OR6, or pBBR1MCS-2::ATCT2OR7 produced in Reference Example 3 was introduced into the EcΔPP. By the same method as in Example 9, the plasmid pMW119::EHER produced in Reference Example 4 was introduced into each of the obtained mutants to generate mutants. The obtained strains were designated as EcΔPP/ADA1. EcΔPP/ADA2, EcΔPP/ADA3, EcΔPP/ADA4, EcΔPP/ADA5. EcΔPP/ADA6, and EcΔPP/ADA7, respectively.

### Example 14

[0307] Production Test of Adipic Acid Using E. coli Mutants with Impaired Pyruvate Kinase Function and with Enhanced PEP Carboxykinase Activity

[0308] The mutants produced in Example 13 were cultured in the same manner as in Example 6, except that ampicillin was added to the culture medium to a final concentration of 500 μg/mL. The concentrations of adipic acid and other products accumulated in the culture supernatant and the concentration of sugars remaining unused in the culture medium were quantified. The quantification of adipic acid was performed using LC-MS/MS under the same conditions for the quantification of 3-hydroxyadipic acid and α-hydromuconic acid. The yield of adipic acid calculated using the formula (2) from the measured values is shown in Table 10.

### Comparative Example 11

[0309] Production Test of Adipic Acid Using E. coli Mutants with Intact Pyruvate Kinase Function and with Enhanced PEP Carboxykinase Activity

[0310] The mutants produced in Reference Example 17 were cultured in the same manner as in Example 14. The concentrations of adipic acid and other products accumulated in the culture supernatant and the concentration of sugars remaining unused in the culture medium were quantified. The yield of adipic acid calculated using the formula (2) from the measured values is shown in Table 10.

### Comparative Example 12

[0311] Production Test of Adipic Acid Using E. coli Mutants with Impaired Pyruvate Kinase Function and with Unenhanced PEP Carboxykinase Activity

[0312] The mutants produced in Reference Example 18 were cultured in the same manner as in Example 14. The concentrations of adipic acid and other products accumulated in the culture supernatant and the concentration of sugars remaining unused in the culture medium were quantified. The yield of adipic acid calculated using the formula (2) from the measurement results is shown in Table 10.

[0313] By comparing the results of Comparative Examples 11 and 12 with that of Example 14, it was found that the yield of adipic acid was increased by impairing the function of pyruvate kinase and enhancing the PEP carboxykinase activity in E. coli.

TABLE 10

| | Strain | Yield of ADA (%) |
|---|---|---|
| Example 14 | EcΔPP/ADA1PCK | 0.0374 |
| | EcΔPP/ADA 2 PCK | 0.0479 |
| | EcΔPP/ADA 3 PCK | 0.0391 |
| | EcΔPP/ADA 4 PCK | 0.0372 |
| | EcΔPP/ADA 5 PCK | 0.0436 |
| | EcΔPP/ADA 6 PCK | 0.0500 |
| | EcΔPP/ADA 7 PCK | 0.0345 |
| Comparative | Ec/pBBRpMW | N.D. |
| Example 11 | Ec/ADA 1 PCK | 0.0109 |
| | Ec/ADA 2 PCK | 0.0115 |
| | Ec/ADA 3 PCK | 0.00993 |
| | Ec/ADA 4 PCK | 0.0131 |
| | Ec/ADA 5 PCK | 0.00920 |
| | Ec/ADA 6 PCK | 0.0104 |
| | Ec/ADA 7 PCK | 0.0113 |
| Comparative | EcΔPP/pBBRpMW | N.D. |
| Example 12 | EcΔPP/ADA 1 | 0.0213 |
| | EcΔPP/ADA 2 | 0.0338 |
| | EcΔPP/ADA 3 | 0.0293 |
| | EcΔPP/ADA 4 | 0.0315 |
| | EcΔPP/ADA 5 | 0.0382 |
| | EcΔPP/ADA 6 | 0.0407 |
| | EcΔPP/ADA 7 | 0.0235 |

### Example 15

[0314] Production Test 2 of 3-Hydroxyadipic Acid and α-Hydromuconic Acid Using Mutant Microorganisms of the Genus Serratia with Impaired Pyruvate Kinase Function and with Enhanced PEP Carboxykinase Activity

[0315] The production test of 3-hydroxyadipic acid and α-hydromuconic acid was conducted using the mutant microorganisms of the genus Serratia produced in Example 2 under anaerobic conditions.

[0316] The mutant microorganisms of the genus Serratia produced in Example 2 were cultured in the same manner as in Example 3, except that the mutant microorganisms were cultured statically using the culture medium II. The concentrations of 3-hydroxyadipic acid, α-hydromuconic acid, and other products accumulated in the culture supernatant and the concentration of sugars remaining unused in the culture medium were quantified. The yields of 3-hydroxyadipic acid and α-hydromuconic acid calculated using the above formula (2) from the measured values are shown in Table 11.

### Comparative Example 13

[0317] Production Test 2 of 3-Hydroxyadipic Acid and α-Hydromuconic Acid Using Mutant Microorganisms of the Genus Serratia with Intact Pyruvate Kinase Function and with Enhanced PEP Carboxykinase Activity

[0318] The mutants produced in Reference Example 7 were cultured in the same manner as in Example 15. The concentrations of 3-hydroxyadipic acid, α-hydromuconic acid, and other products accumulated in the culture supernatant and the concentration of sugars remaining unused in the culture medium were quantified. The yields of 3-hydroxyadipic acid and α-hydromuconic acid calculated using the above formula (2) from the measured values are shown in Table 11.

### Comparative Example 14

[0319] Production Test 2 of 3-Hydroxyadipic Acid and α-Hydromuconic Acid Using Mutant Microorganisms of the Genus Serratia with Impaired Pyruvate Kinase Function and with Unenhanced PEP Carboxykinase Activity

[0320] The mutants produced in Reference Example 8 were cultured in the same manner as in Example 15. The concentrations of 3-hydroxyadipic acid, α-hydromuconic acid, and other products accumulated in the culture supernatant and the concentration of sugars remaining unused in the culture medium were quantified. The yields of 3-hydroxyadipic acid and α-hydromuconic acid calculated using the above formula (2) from the measured values are shown in Table 11.

[0321] By comparing the results of Comparative Examples 13 and 14 with that of Example 15, it was found that the yields of 3-hydroxyadipic acid and α-hydromuconic acid were increased even under anaerobic conditions by impairing the function of pyruvate kinase and enhancing the PEP carboxykinase activity in the microorganism of the genus Serratia.

TABLE 11

| | | Yield of 3HA | Yield of HMA |
|---|---|---|---|
| | Strain | (%) | (%) |
| Example 15 | SgΔPP/3HA1PCK | 6.22 | 0.233 |
| | SgΔPP/3HA2 PCK | 7.34 | 0.239 |
| | SgΔPP/3HA3 PCK | 7.30 | 0.245 |
| | SgΔPP/3HA4 PCK | 7.50 | 0.267 |
| | SgΔPP/3HA5 PCK | 6.45 | 0.233 |
| | SgΔPP/3HA6 PCK | 6.70 | 0.256 |
| | SgΔPP/3HA7 PCK | 6.85 | 0.224 |
| Comparative | Sg/pBBR | N.D. | N.D. |
| Example 13 | Sg/3HA1 PCK | 1.14 | 0.0345 |
| | Sg/3HA2 PCK | 1.71 | 0.0415 |
| | Sg/3HA3 PCK | 1.33 | 0.0337 |
| | Sg/3HA4 PCK | 1.37 | 0.0378 |
| | Sg/3HA5 PCK | 1.59 | 0.3750 |
| | Sg/3HA6 PCK | 2.07 | 0.0452 |
| | Sg/3HA7 PCK | 1.12 | 0.0428 |
| Comparative | SgΔPP/pBBR | 0.0485 | 0.0224 |
| Example 14 | SgΔPP/3HA1 | 4.84 | 0.159 |
| | SgΔPP/3HA2 | 6.07 | 0.171 |
| | SgΔPP/3HA3 | 5.99 | 0.143 |
| | SgΔPP/3HA4 | 5.30 | 0.195 |
| | SgΔPP/3HA5 | 5.84 | 0.180 |
| | SgΔPP/3HA6 | 6.02 | 0.202 |
| | SgΔPP/3HA7 | 5.98 | 0.160 |

### Example 16

[0322] Production Test 2 of 3-Hydroxyadipic Acid and α-Hydromuconic Acid Using E. coli Mutants with Impaired Pyruvate Kinase Function

[0323] The production test of 3-hydroxyadipic acid and α-hydromuconic acid was conducted under anaerobic conditions using the E. coli mutants produced in Example 5.

[0324] The E. coli mutants produced in Example 5 were cultured in the same manner as in Example 6, except that the mutants were cultured statically using the culture medium II. The concentrations of 3-hydroxyadipic acid, α-hydromuconic acid, and other products accumulated in the culture supernatant and the concentration of sugars remaining unused in the culture medium were quantified. The yields of 3-hydroxyadipic acid and α-hydromuconic acid calculated using the above formula (2) from the measured values are shown in Table 12.

### Comparative Example 15

[0325] Production Test 2 of 3-Hydroxyadipic Acid and α-Hydromuconic Acid Using E. coli Mutants with Intact Pyruvate Kinase Function and with Enhanced PEP Carboxykinase Activity

[0326] The mutants produced in Reference Example 9 were cultured in the same manner as in Example 16. The concentrations of 3-hydroxyadipic acid, α-hydromuconic acid, and other products accumulated in the culture supernatant and the concentration of sugars remaining unused in the culture medium were quantified. The yields of 3-hydroxyadipic acid and α-hydromuconic acid calculated using the above formula (2) from the measured values are shown in Table 12.

### Comparative Example 16

[0327] Production Test 2 of 3-Hydroxyadipic Acid and α-Hydromuconic Acid Using E. coli Mutants with Impaired Pyruvate Kinase Function and with Unenhanced PEP Carboxykinase Activity

[0328] The mutants produced in Reference Example 10 were cultured in the same manner as in Example 16. The concentrations of 3-hydroxyadipic acid, α-hydromuconic acid, and other products accumulated in the culture supernatant and the concentration of sugars remaining unused in the culture medium were quantified. The yields of 3-hydroxyadipic acid and α-hydromuconic acid calculated using the above formula (2) from the measured values are shown in Table 12.

[0329] By comparing the results of Comparative Examples 15 and 16 with that of Example 16, it was found that the yields of 3-hydroxyadipic acid and α-hydromuconic acid were increased even under anaerobic conditions by impairing the function of pyruvate kinase and enhancing the PEP carboxykinase activity in E. coli.

TABLE 12

| | | Yield of 3HA | Yield of HMA |
|---|---|---|---|
| | Strain | (%) | (%) |
| Example 16 | EcΔPP/3HA1PCK | 15.6 | 0.0289 |
| | EcΔPP/3HA2 PCK | 16.8 | 0.0334 |
| | EcΔPP/3HA3 PCK | 15.5 | 0.0355 |
| | EcΔPP/3HA4 PCK | 15.8 | 0.0295 |
| | EcΔPP/3HA5 PCK | 16.2 | 0.0326 |
| | EcΔPP/3HA6 PCK | 17.2 | 0.0279 |
| | EcΔPP/3HA7 PCK | 16.4 | 0.0270 |
| Comparative | Ec/pBBR | N.D. | N.D. |
| Example 15 | Ec/3HA1 PCK | 0.963 | 0.0116 |
| | Ec/3HA2 PCK | 1.46 | 0.0103 |
| | Ec/3HA3 PCK | 1.34 | 0.0106 |
| | Ec/3HA4 PCK | 1.09 | 0.0102 |
| | Ec/3HA5 PCK | 1.49 | 0.0120 |
| | Ec/3HA6 PCK | 1.20 | 0.1120 |
| | Ec/3HA7 PCK | 0.940 | 0.1220 |
| Comparative | EcΔPP/pBBR | 0.0669 | 0.0113 |
| Example 16 | EcΔPP/3HA1 | 13.2 | 0.0213 |
| | EcΔPP/3HA2 | 14.9 | 0.0277 |
| | EcΔPP/3HA3 | 13.9 | 0.0268 |
| | EcΔPP/3HA4 | 14.1 | 0.0224 |
| | EcΔPP/3HA5 | 14.3 | 0.0259 |
| | EcΔPP/3HA6 | 14.7 | 0.0226 |
| | EcΔPP/3HA7 | 13.2 | 0.0213 |

### Example 17

[0330] Production Test 2 of Adipic Acid Using Mutant Microorganisms of the Genus Serratia with Impaired Pyruvate Kinase Function and with Enhanced PEP Carboxykinase Activity

[0331] The production test of adipic acid was conducted using the mutant microorganisms of the genus Serratia produced in Example 11 under anaerobic conditions.

[0332] The mutant microorganisms of the genus Serratia produced in Example 11 were cultured in the same manner as in Example 12, except that the mutant microorganisms were cultured statically using the culture medium II. The concentrations of adipic acid and other products accumulated in the culture supernatant and the concentration of sugars remaining unused in the culture medium were quantified. The yield of adipic acid calculated using the formula (2) from the measured values is shown in Table 13.

### Comparative Example 17

[0333] Production Test 2 of Adipic Acid Using Mutant Microorganisms of the Genus Serratia with Intact Pyruvate Kinase Function and with Enhanced PEP Carboxykinase Activity

[0334] The mutants produced in Reference Example 15 were cultured in the same manner as in Example 17. The concentrations of adipic acid and other products accumulated in the culture supernatant and the concentration of sugars remaining unused in the culture medium were quantified. The yield of adipic acid calculated using the formula (2) from the measured values is shown in Table 13.

### Comparative Example 18

[0335] Production Test 2 of Adipic Acid Using Mutant Microorganisms of the Genus Serratia with Impaired Pyruvate Kinase Function and with Unenhanced PEP Carboxykinase Activity

[0336] The mutants produced in Reference Example 16 were cultured in the same manner as in Example 17. The concentrations of adipic acid and other products accumulated in the culture supernatant and the concentration of sugars remaining unused in the culture medium were quantified. The yield of adipic acid calculated using the formula (2) from the measured values is shown in Table 13.

[0337] By comparing the results of Comparative Examples 17 and 18 with that of Example 17, it was found that the yield of adipic acid was increased even under anaerobic conditions by impairing the function of pyruvate kinase and enhancing the PEP carboxykinase activity in the microorganism of the genus Serratia.

TABLE 13

| | Strain | Yield of ADA (%) |
|---|---|---|
| Example 17 | SgΔPP/ADA1PCK | 0.0699 |
| | SgΔPP/ADA 2 PCK | 0.0720 |
| | SgΔPP/ADA 3 PCK | 0.0591 |
| | SgΔPP/ADA 4 PCK | 0.0613 |
| | SgΔPP/ADA 5 PCK | 0.0628 |
| | SgΔPP/ADA 6 PCK | 0.0637 |
| | SgΔPP/ADA 7 PCK | 0.0518 |
| Comparative | Sg/pBBRpMW | N.D. |
| Example 17 | Sg/ADA 1 PCK | 0.0102 |
| | Sg/ADA 2 PCK | 0.0123 |
| | Sg/ADA 3 PCK | 0.0129 |
| | Sg/ADA 4 PCK | 0.0122 |
| | Sg/ADA 5 PCK | 0.0107 |
| | Sg/ADA 6 PCK | 0.0103 |
| | Sg/ADA 7 PCK | 0.0790 |
| Comparative | SgΔPP/pBBRpMW | N.D. |
| Example 18 | SgΔPP/ADA 1 | 0.0359 |
| | SgΔPP/ADA 2 | 0.0480 |
| | SgΔPP/ADA 3 | 0.0379 |
| | SgΔPP/ADA 4 | 0.0395 |
| | SgΔPP/ADA 5 | 0.0431 |
| | SgΔPP/ADA 6 | 0.0490 |
| | SgΔPP/ADA 7 | 0.0375 |

### Example 18

[0338] Production Test 2 of Adipic Acid Using E. coli Mutants with Impaired Pyruvate Kinase Function

[0339] The production test of adipic acid was conducted using the E. coli mutants produced in Example 13 under anaerobic conditions. The E. coli mutants produced in Example 13 were cultured in the same manner as in Example 14, except that the mutants were cultured statically using the culture medium II. The concentrations of adipic acid and other products accumulated in the culture supernatant and the concentration of sugars remaining unused in the culture medium were quantified. The yield of adipic acid calculated using the formula (2) from the measured values is shown in Table 14.

### Comparative Example 19

[0340] Production Test 2 of Adipic Acid Using E. coli Mutants with Intact Pyruvate Kinase Function and with Enhanced PEP Carboxykinase Activity

[0341] The mutants produced in Reference Example 17 were cultured in the same manner as in Example 18. The concentrations of adipic acid and other products accumulated in the culture supernatant and the concentration of sugars remaining unused in the culture medium were quantified. The yield of adipic acid calculated using the formula (2) from the measured values is shown in Table 14.

### Comparative Example 20

[0342] Production Test 2 of Adipic Acid Using E. coli Mutants with Impaired Pyruvate Kinase Function and with Unenhanced PEP Carboxykinase Activity

[0343] The mutants produced in Reference Example 18 were cultured in the same manner as in Example 18. The concentrations of adipic acid and other products accumulated in the culture supernatant and the concentration of sugars remaining unused in the culture medium were quantified. The yield of adipic acid calculated using the formula (2) from the measured values is shown in Table 14.

[0344] By comparing the results of Comparative Examples 19 and 20 with that of Example 18, it was found that the yield of adipic acid was increased even under anaerobic conditions by impairing the function of pyruvate kinase and enhancing the PEP carboxykinase activity in E. coli.

TABLE 14

| | Strain | Yield of ADA (%) |
|---|---|---|
| Example 18 | EcΔPP/ADA1PCK | 0.0311 |
| | EcΔPP/ADA 2 PCK | 0.0384 |
| | EcΔPP/ADA 3 PCK | 0.0304 |
| | EcΔPP/ADA 4 PCK | 0.0274 |
| | EcΔPP/ADA 5 PCK | 0.0254 |
| | EcΔPP/ADA 6 PCK | 0.0345 |
| | EcΔPP/ADA 7 PCK | 0.0324 |
| Comparative | Ec/pBBRpMW | N.D. |
| Example 19 | Ec/ADA 1 PCK | 0.0112 |
| | Ec/ADA 2 PCK | 0.0123 |
| | Ec/ADA 3 PCK | 0.0103 |
| | Ec/ADA 4 PCK | 0.00990 |
| | Ec/ADA 5 PCK | 0.0109 |
| | Ec/ADA 6 PCK | 0.0151 |
| | Ec/ADA 7 PCK | 0.00910 |
| Comparative | EcΔPP/pBBRpMW | N.D. |
| Example 20 | EcΔPP/ADA 1 | 0.0255 |
| | EcΔPP/ADA 2 | 0.0254 |
| | EcΔPP/ADA 3 | 0.0269 |
| | EcΔPP/ADA 4 | 0.0248 |
| | EcΔPP/ADA 5 | 0.0212 |
| | EcΔPP/ADA 6 | 0.0278 |
| | EcΔPP/ADA 7 | 0.0212 |

### Reference Example 19

[0345] Generation of Mutant Microorganisms of the Genus Serratia with Intact Pyruvate Kinase Function and Carrying a Plasmid Expressing Enzymes that Catalyze the Reactions A, B, E, and F

[0346] By the same method as in Example 2, the pBBR1MCS-2 (control), pBBR1MCS-2::ATCTOR1, pBBR1MCS-2::ATCTOR2, pBBR1MCS-2::ATCTOR3, pBBR1MCS-2::ATCTOR4, pBBR1MCS-2::ATCTOR5, pBBR1MCS-2::ATCTOR6, or pBBR1MCS-2::ATCTOR7 was introduced into Serratia grimesii NBRC13537. The obtained strains were designated as Sg/pBBR (negative control), Sg/3HA1, Sg/3HA2, Sg/3HA3, Sg/3HA4, Sg/3HA5, Sg/3HA6, and Sg/3HA7, respectively.

### Comparative Example 21

[0347] Production Test of 3-Hydroxyadipic Acid and α-Hydromuconic Acid Using Mutant Microorganisms of the Genus Serratia with Intact Pyruvate Kinase Function

[0348] The mutant microorganisms of the genus Serratia produced in Reference Example 19 were cultured in the same manner as in Example 3. The concentrations of 3-hydroxyadipic acid, α-hydromuconic acid, and other products accumulated in the culture supernatant and the concentration of sugars remaining unused in the culture medium were quantified. The yields of 3-hydroxyadipic acid and α-hydromuconic acid calculated using the above formula (2) from the measurement results are shown in Table 15.

[0349] By comparing the results of Comparative Example 21 and Comparative Example 1, it was found that the yields of 3-hydroxyadipic acid and α-hydromuconic acid were decreased in the microorganisms of the genus Serratia with intact pyruvate kinase function and with enhanced PEP carboxykinase activity, as compared to those with unenhanced PEP carboxykinase activity.

TABLE 15

| | | Yield of 3HA | Yield of HMA |
|---|---|---|---|
| | Strain | (%) | (%) |
| Comparative | Sg/pBBR | N.D. | N.D. |
| Example 21 | Sg/3HA1 | 0.784 | 0.0293 |
| | Sg/3HA2 | 1.15 | 0.0470 |
| | Sg/3HA3 | 0.942 | 0.0461 |
| | Sg/3HA4 | 0.875 | 0.0418 |
| | Sg/3HA5 | 1.01 | 0.0529 |
| | Sg/3HA6 | 1.03 | 0.0366 |
| | Sg/3HA7 | 0.943 | 0.0237 |

### Reference Example 20

[0350] Generation of E. coli Mutants with Intact Pyruvate Kinase Function and Carrying a Plasmid Expressing Enzymes that Catalyze the Reactions A, B, E, and F

[0351] By the same method as in Example 5, the pBBR1MCS-2 (control), pBBR1MCS-2::ATCTOR1, pBBR1MCS-2::ATCTOR2, pBBR1MCS-2::ATCTOR3, pBBR1MCS-2::ATCTOR4, pBBR1MCS-2::ATCTOR5, pBBR1MCS-2::ATCTOR6, or pBBR1MCS-2::ATCTOR7 was introduced into Escherichia coli MG1655. The obtained strains were designated as Ec/pBBR (negative control), Ec/3HA1, Ec/3HA2, Ec/3HA3, Ec/3HA4, Ec/3HA5, Ec/3H-A6, and Ec/3HA7, respectively.

### Comparative Example 22

[0352] Production Test of 3-Hydroxyadipic Acid and α-Hydromuconic Acid Using E. coli Mutants with Intact Pyruvate Kinase Function

[0353] The mutants produced in Reference Example 20 were cultured in the same manner as in Example 6. The concentrations of 3-hydroxyadipic acid, α-hydromuconic acid, and other products accumulated in the culture supernatant and the concentration of sugars remaining unused in the culture medium were quantified. The yields of 3-hydroxyadipic acid and α-hydromuconic acid calculated using the above formula (2) from the measured values are shown in Table 16.

[0354] By comparing the results of Comparative Example 22 and Comparative Example 3, it was found that the yields of 3-hydroxyadipic acid and α-hydromuconic acid were decreased in the E. coli strains with intact pyruvate kinase function and with enhanced PEP carboxykinase activity, as compared to those with unenhanced PEP carboxykinase activity.

TABLE 16

| | | Yield of 3HA | Yield of HMA |
|---|---|---|---|
| | Strain | (%) | (%) |
| Comparative | Ec/pBBR | N.D. | N.D. |
| Example 22 | Ec/3HA1 | 1.48 | 0.0172 |
| | Ec/3HA2 | 2.59 | 0.0160 |
| | Ec/3HA3 | 2.64 | 0.0167 |
| | Ec/3HA4 | 1.82 | 0.0186 |
| | Ec/3HA5 | 2.47 | 0.0166 |
| | Ec/3HA6 | 2.66 | 0.0228 |
| | Ec/3HA7 | 1.78 | 0.0172 |

### Reference Example 21

[0355] Generation of Mutant Microorganisms of the Genus Serratia with Intact Pyruvate Kinase Function and Carrying Plasmids Expressing Enzymes that Catalyze the Reactions A, B, C, E, and F

[0356] By the same method as in Example 7, the pMW119 (control) or pMW119::EH was introduced into Sg/pBBR, Sg/3HA1, Sg/3HA2, Sg/3HA3, Sg/3HA4, Sg/3HA5, Sg/3HA6, and Sg/3HA7. The obtained strains were designated as Sg/pBBRpMW (negative control), Sg/HMA1, Sg/HMA2, Sg/HMA3, Sg/HMA4, Sg/HMA5, Sg/HMA6, and Sg/HMA7, respectively.

### Comparative Example 23

[0357] Production Test of α-Hydromuconic Acid Using Mutant Microorganisms of the Genus Serratia with Intact Pyruvate Kinase Function

[0358] The mutants produced in Reference Example 21 were cultured in the same manner as in Example 8. The concentrations of α-hydromuconic acid and other products accumulated in the culture supernatant and the concentration of sugars remaining unused in the culture medium were quantified. The yield of α-hydromuconic acid calculated using the above formula (2) from the measured values is shown in Table 17.

[0359] By comparing the results of Comparative Example 23 and Comparative Example 5, it was found that the yield of α-hydromuconic acid was decreased in the microorganisms of the genus Serratia with intact pyruvate kinase function and with enhanced PEP carboxykinase activity, as compared to those with unenhanced PEP carboxykinase activity.

TABLE 17

| | Strain | Yield of HMA (%) |
|---|---|---|
| Comparative | Sg/pBBRpMW | N.D. |
| Example 23 | Sg/HMA1 | 0.0495 |
| | Sg/HMA2 | 0.0584 |
| | Sg/HMA3 | 0.0434 |
| | Sg/HMA4 | 0.0524 |
| | Sg/HMA5 | 0.0587 |
| | Sg/HMA6 | 0.0618 |
| | Sg/HMA7 | 0.0519 |

### Reference Example 22

[0360] Generation of E. coli Mutants with Intact Pyruvate Kinase Function and Carrying Plasmids Expressing Enzymes that Catalyze the Reactions A, B, C, F, and F

[0361] By the same method as in Example 9, the pMW119 (control) or pMW119::EH was introduced into the Ec/pBBR, Ec/3HA1, Ec/3HA2, Ec/3HA3, Ec/3HA4, Ec/3HA5, Ec/3HA6, and Ec/3HA7. The obtained strains were designated as Ec/pBBRpMW (negative control), Ec/HMA1, Ec/HMA2, Ec/HMA3, Ec/HMA4, Ec/HMA5, Ec/HMA6, and Ec/HMA7, respectively.

### Comparative Example 24

[0362] Production Test of α-Hydromuconic Acid Using E. coli Mutants with Intact Pyruvate Kinase Function

[0363] The mutants produced in Reference Example 22 were cultured in the same manner as in Example 10. The concentrations of α-hydromuconic acid and other products accumulated in the culture supernatant and the concentration of sugars remaining unused in the culture medium were quantified. The yield of α-hydromuconic acid calculated using the above formula (2) from the measured values is shown in Table 18.

[0364] By comparing the results of Comparative Example 24 and Comparative Example 7, it was found that the yield of α-hydromuconic acid was decreased in the E. coli strains with intact pyruvate kinase function and with enhanced PEP carboxykinase activity, as compared to those with unenhanced PEP carboxykinase activity.

TABLE 18

| | Strain | Yield of HMA (%) |
|---|---|---|
| Comparative | Ec/pBBRpMW | N.D. |
| Example 24 | Ec/HMA1 | 0.0362 |
| | Ec/HMA2 | 0.0636 |
| | Ec/HMA3 | 0.0569 |
| | Ec/HMA4 | 0.0624 |
| | Ec/HMA5 | 0.0621 |
| | Ec/HMA6 | 0.0640 |
| | Ec/HMA7 | 0.0491 |

### Reference Example 23

[0365] Generation of Mutant Microorganisms of the Genus Serratia with Intact Pyruvate Kinase Function and Carrying Plasmids Expressing Enzymes that Catalyze the Reactions A, B, C, D, and G

[0366] By the same method as in Example 11, the pBBR1MCS-2::ATCT2OR1, pBBR1MCS-2::ATCT2OR2, pBBR1MCS-2::ATCT2OR3, pBBR1MCS-2::ATCT2OR4, pBBR1MCS-2::ATCT2OR5, pBBR1MCS-2::ATCT2OR6, or pBBR1MCS-2::ATCT2OR7 produced in Reference Example 3 was introduced into Serratia grimesii NBRC13537. By the same method as in Example 7, the plasmid pMW119::EHER produced in Reference Example 4 was introduced into each of the obtained mutants to generate mutant microorganisms of the genus Serratia. The obtained strains were designated as Sg/ADA1, Sg/ADA2, Sg/ADA3, Sg/ADA4, Sg/ADA5, Sg/ADA6, and Sg/ADA7, respectively.

### Comparative Example 25

[0367] Production Test of Adipic Acid Using Mutant Microorganisms of the Genus Serratia with Intact Pyruvate Kinase Function

[0368] The mutants produced in Reference Example 23 and the Sg/pBBRpMW were cultured in the same manner as in Example 8. The concentrations of adipic acid and other products accumulated in the culture supernatant and the concentration of sugars remaining unused in the culture medium were quantified. The yield of adipic acid calculated using the above formula (2) from the measured values is shown in Table 19.

[0369] By comparing the results of Comparative Example 25 and Comparative Example 9, it was found that the yield of adipic acid was decreased in the microorganisms of the genus Serratia with intact pyruvate kinase function and with enhanced PEP carboxykinase activity, as compared to those with unenhanced PEP carboxykinase activity.

TABLE 19

| | Strain | Yield of ADA (%) |
|---|---|---|
| Comparative | Sg/pBBRpMW | N.D. |
| Example 25 | Sg/ADA1 | 0.0244 |
| | Sg/ADA2 | 0.0325 |
| | Sg/ADA3 | 0.0254 |
| | Sg/ADA4 | 0.0246 |
| | Sg/ADA5 | 0.0314 |
| | Sg/ADA6 | 0.0264 |
| | Sg/ADA7 | 0.0289 |

### Reference Example 24

[0370] Generation of E. coli Mutants with Intact Pyruvate Kinase Function and Carrying Plasmids Expressing Enzymes that Catalyze the Reactions A, B, C, D, and G

[0371] By the same method as in Example 13, the pBBR1MCS-2::ATCT2OR1, pBBR1MCS-2::ATCT2OR2, pBBR1MCS-2::ATCT2OR3, pBBR1MCS-2::ATCT2OR4, pBBR1 MCS-2::ATCT2OR5, pBBR1MCS-2::ATCT2OR6, or pBBR1MCS-2::ATCT2OR7 produced in Reference Example 3 was introduced into Escherichia coli MG1655. By the same method as in Example 9, the plasmid pMW119::EHER produced in Reference Example 4 was introduced into each of the obtained mutants to generate E. coli mutants. The obtained strains were designated as Ec/ADA1, Ec/ADA2, Ec/ADA3, Ec/ADA4, Ec/ADA5, Ec/ADA6, and Ec/ADA7, respectively.

### Comparative Example 26

[0372] Production Test of Adipic Acid Using E. coli Mutants with Intact Pyruvate Kinase Function

[0373] The mutants produced in Reference Example 24 and the Ec/pBBRpMW were cultured in the same manner as in Example 10. The concentrations of adipic acid and other products accumulated in the culture supernatant and the concentration of sugars remaining unused in the culture medium were quantified. The yield of adipic acid calculated using the above formula (2) from the measured values is shown in Table 20.

[0374] By comparing the results of Comparative Example 26 and Comparative Example 11, it was found that the yield of adipic acid was decreased in the E. coli strains with intact pyruvate kinase function and with enhanced PEP carboxykinase activity, as compared to those with unenhanced PEP carboxykinase activity.

TABLE 20

| | Strain | Yield of ADA (%) |
|---|---|---|
| Comparative | Ec/pBBRpMW | N.D. |
| Example 26 | Ec/ADA1 | 0.0148 |
| | Ec/ADA2 | 0.0153 |
| | Ec/ADA3 | 0.0107 |
| | Ec/ADA4 | 0.0192 |
| | Ec/ADA5 | 0.0139 |
| | Ec/ADA6 | 0.0147 |
| | Ec/ADA7 | 0.0167 |

### Comparative Example 27

[0375] Production Test 2 of 3-Hydroxyadipic Acid and α-Hydromuconic Acid Using Mutant Microorganisms of the Genus Serratia with Intact Pyruvate Kinase Function

[0376] The mutants produced in Reference Example 19 were cultured in the same manner as in Example 15. The concentrations of 3-hydroxyadipic acid, α-hydromuconic acid, and other products accumulated in the culture supernatant and the concentration of sugars remaining unused in the culture medium were quantified. The yields of 3-hydroxyadipic acid and α-hydromuconic acid calculated using the above formula (2) from the measured values are shown in Table 21.

[0377] By comparing the results of Comparative Example 27 and Comparative Example 13, it was found that the yields of 3-hydroxyadipic acid and α-hydromuconic acid were decreased even under anaerobic conditions in the microorganisms of the genus Serratia with intact pyruvate kinase function and with enhanced PEP carboxykinase activity, as compared to those with unenhanced PEP carboxykinase activity.

TABLE 21

| | Strain | Yield of 3HA (%) | Yield of HMA (%) |
|---|---|---|---|
| Comparative | Sg/pBBR | N.D. | N.D. |
| Example 27 | Sg/3HA1 | 1.68 | 0.0482 |
| | Sg/3HA2 | 2.46 | 0.0577 |
| | Sg/3HA3 | 1.94 | 0.0471 |
| | Sg/3HA4 | 1.99 | 0.0527 |
| | Sg/3HA5 | 2.29 | 0.0523 |
| | Sg/3HA6 | 2.95 | 0.0627 |
| | Sg/3HA7 | 1.66 | 0.0595 |

### Comparative Example 28

[0378] Production Test 2 of 3-Hydroxyadipic Acid and α-Hydromuconic Acid Using E. coli Mutants with Intact Pyruvate Kinase Function

[0379] The mutants produced in Reference Example 20 were cultured in the same manner as in Example 16. The concentrations of 3-hydroxyadipic acid, α-hydromuconic acid, and other products accumulated in the culture supernatant and the concentration of sugars remaining unused in the culture medium were quantified. The yields of 3-hydroxyadipic acid and α-hydromuconic acid calculated using the above formula (2) from the measured values are shown in Table 22.

[0380] By comparing the results of Comparative Example 28 and Comparative Example 15, it was found that the yields of 3-hydroxyadipic acid and α-hydromuconic acid were decreased even under anaerobic conditions in the E. coli strains with intact pyruvate kinase function and with enhanced PEP carboxykinase activity, as compared to those with unenhanced PEP carboxykinase activity.

TABLE 22

| | | Yield of 3HA | Yield of HMA |
|---|---|---|---|
| | Strain | (%) | (%) |
| Comparative | Ec/pBBR | N.D. | N.D. |
| Example 28 | Ec/3HA1 | 1.32 | 0.0171 |
| | Ec/3HA2 | 2.00 | 0.0154 |
| | Ec/3HA3 | 1.82 | 0.0130 |
| | Ec/3HA4 | 1.47 | 0.0136 |
| | Ec/3HA5 | 2.17 | 0.0138 |
| | Ec/3HA6 | 1.77 | 0.0166 |
| | Ec/3HA7 | 1.14 | 0.0179 |

### Comparative Example 29

[0381] Production Test 2 of Adipic Acid Using Mutant Microorganisms of the Genus Serratia with Intact Pyruvate Kinase Function

[0382] The mutants produced in Reference Example 23 were cultured in the same manner as in Example 17. The concentrations of adipic acid and other products accumulated in the culture supernatant and the concentration of sugars remaining unused in the culture medium were quantified. The yield of adipic acid calculated using the above formula (2) from the measured values is shown in Table 23.

[0383] By comparing the results of Comparative Example 29 and Comparative Example 17, it was found that the yield of adipic acid was decreased even under anaerobic conditions in the microorganisms of the genus Serratia with intact pyruvate kinase function and with enhanced PEP carboxykinase activity, as compared to those with unenhanced PEP carboxykinase activity.

TABLE 23

| | Strain | Yield of ADA (%) |
|---|---|---|
| Comparative | Sg/pBBRpMW | N.D. |
| Example 29 | Sg/ADA1 | 0.0152 |
| | Sg/ADA2 | 0.0181 |
| | Sg/ADA3 | 0.0188 |
| | Sg/ADA4 | 0.0179 |
| | Sg/ADA5 | 0.0135 |
| | Sg/ADA6 | 0.0130 |
| | Sg/ADA7 | 0.00930 |

### Comparative Example 30

[0384] Production Test 2 of Adipic Acid Using E. coli Mutants with Intact Pyruvate Kinase Function

[0385] The mutants produced in Reference Example 24 were cultured in the same manner as in Example 18. The concentrations of adipic acid and other products accumulated in the culture supernatant and the concentration of sugars remaining unused in the culture medium were quantified. The yield of adipic acid calculated using the above formula (2) from the measured values is shown in Table 24.

[0386] By comparing the results of Comparative Example 30 and Comparative Example 19, it was found that the yield of adipic acid was decreased even under anaerobic conditions in the E. coli strains with intact pyruvate kinase function and with enhanced PEP carboxykinase activity, as compared to those with unenhanced PEP carboxykinase activity.

TABLE 24

| | Strain | Yield of ADA (%) |
|---|---|---|
| Comparative | Ec/pBBRpMW | N.D. |
| Example 30 | Ec/ADA1 | 0.0166 |
| | Ec/ADA2 | 0.0180 |
| | Ec/ADA3 | 0.0140 |
| | Ec/ADA4 | 0.0161 |
| | Ec/ADA5 | 0.0148 |
| | Ec/ADA6 | 0.0219 |
| | Ec/ADA7 | 0.0123 |

### Example 19

[0387] Generation of a Mutant Microorganism of the Genus Serratia with Defects in Genes Encoding Pyruvate Kinase and a Phosphotransferase System Enzyme

[0388] A mutant microorganism of the genus Serratia with impaired function of both pyruvate kinase and a phosphotransferase system enzyme was generated by disrupting a gene encoding a phosphotransferase, ptsG, in the SgΔPP strain produced in Example 1.

[0389] A PCR reaction was performed using pKD4 as a template and oligo DNAs represented by SEQ ID NOs: 244 and 245 as primers to obtain a PCR fragment of 1.6 kb in length for disruption of ptsG. The introduction of pKD46 into the above strain was followed by the introduction of the PCR fragment for disruption of ptsG into the resulting strain. Colony direct PCR was performed on the resulting kanamycin-resistant strains to confirm the deletion of the gene of interest and the insertion of a kanamycin resistance gene from the length of the amplified band. Oligo DNA primers represented by SEQ ID NOs: 224 and 247 were used.

[0390] Subsequently, an ampicillin-sensitive strain was obtained by segregating away the pKD46. The plasmid pCP20 was introduced into the ampicillin-sensitive strain, and ampicillin-resistant strains were again obtained. Colony direct PCR was performed on the obtained strains to confirm the deletion of the kanamycin resistance gene from the length of the amplified band. Oligo DNA primers represented by SEQ ID NOs: 246 and 247 were used. The pCP20 was segregated away from one of the kanamycin-sensitive strains. The obtained strain is hereinafter referred to as SgΔPPG.

### Example 20

[0391] Generation of a Mutant Microorganism of the Genus Serratia with Defects in Genes Encoding Pyruvate Kinase and a Phosphotransferase System Enzyme and Carrying a Plasmid Expressing a PEP Carboxykinase and Enzymes Catalyzing the Reactions A, B, E, and F

[0392] By the same method as in Example 2, a plasmid produced in Reference Example 5, pBBR1MCS-2::ATCTOR1PCK, was introduced into the SgΔPPG strain produced in Example 19, and the obtained mutant microorganism of the genus Serratia was designated as SgΔPPG/3HA1PCK.

### Example 21

[0393] Production Test of 3-Hydroxyadipic Acid and α-Hydromuconic Acid Using a Mutant Microorganism of the Genus Serratia with Impaired Function of Both Pyruvate Kinase and a Phosphotransferase System Enzyme, and Carrying a Plasmid Expressing a PEP Carboxykinase and Enzymes Catalyzing the Reactions A, B, E, and F

[0394] By the same method as in Example 15, the production test of 3-hydroxyadipic acid and α-hydromuconic acid was conducted using the mutant microorganism of the genus Serratia produced in Example 20.

### Comparative Example 31

[0395] Production Test of 3-Hydroxyadipic Acid and α-Hydromuconic Acid Using a Mutant Microorganism of the Genus Serratia with Intact Pyruvate Kinase Function and Intact Phosphotransferase System Enzyme Function and Carrying a Plasmid Expressing a PEP Carboxykinase and Enzymes Catalyzing the Reactions A, B, E, and F

[0396] By the same method as in Comparative Example 13, the production test of 3-hydroxyadipic acid and α-hydromuconic acid was conducted using the Sg/3HA1PCK strain produced in Reference Example 7.

[0397] By comparing the results of Example 21 and Example 15, it was found that the yields of 3-hydroxyadipic acid and α-hydromuconic acid were further increased in the mutant microorganism of the genus Serratia with defects in the genes encoding pyruvate kinase and the phosphotransferase system enzyme and with enhanced activities of PEP carboxykinase and of an enzyme that catalyzes the reaction of reducing 3-oxoadipyl-CoA to 3-hydroxyadipyl-CoA. Additionally, by comparing the results of Example 21 and Comparative Example 31, it was found that the yields of acetic acid and ethanol, both of which were generated by conversion of acetyl-CoA, were also increased in the mutant with defects in the genes encoding pyruvate kinase and the phosphotransferase system enzyme.

TABLE 25

| | | | | Yield of | Yield of | Yield of |
|---|---|---|---|---|---|---|
| | | Yield of | Yield of | succinic | acetic | ethanol |
| | Strain | 3HA (%) | HMA (%) | acid (%) | acid (%) | (%) |
| Example 21 | SgΔPPG/3HA1PCK | 8.21 | 0.467 | 45.6 | 43.2 | 50.2 |
| Comparative | Sg/3HA1 PCK | 1.14 | 0.0345 | 12.65 | 28.5 | 34.9 |
| Example 31 | | | | | | |

### Example 22

[0398] Generation of an E. coli Mutant with Defects in Genes Encoding Pyruvate Kinase and a Phosphotransferase System Enzyme

[0399] An E. coli mutant with impaired function of both pyruvate kinase and a phosphotransferase system enzyme was generated by disrupting a gene encoding a phosphotransferase, ptsG, in the EcΔPP produced in Example 4.

[0400] A PCR reaction was performed using pKD4 as a template and oligo DNAs represented by SEQ ID NOs: 248 and 249 as primers to obtain a PCR fragment of 1.6 kb in length for disruption of ptsG. The introduction of pKD46 into the above strain was followed by the introduction of the PCR fragment for disruption ofptsG into the resulting strain. Colony direct PCR was performed on the resulting kanamycin-resistant strains to confirm the deletion of the gene of interest and the insertion of a kanamycin resistance gene from the length of the amplified band. Oligo DNA primers represented by SEQ ID NOs: 224 and 251 were used.

[0401] Subsequently, an ampicillin-sensitive strain was obtained by segregating away the pKD46. The plasmid pCP20 was introduced into the ampicillin-sensitive strain, and ampicillin-resistant strains were again obtained. Colony direct PCR was performed on the obtained strains to confirm the deletion of the kanamycin resistance gene from the length of the amplified band. Oligo DNA primers represented by SEQ ID NOs: 250 and 251 were used. The pCP20 was segregated away from one of the kanamycin-sensitive strains. The obtained strain is hereinafter referred to as EcΔPPG.

### Example 23

[0402] Generation of an E. coli Mutant with Defects in Genes Encoding Pyruvate Kinase and a Phosphotransferase System Enzyme and Carrying a Plasmid Expressing a PEP Carboxykinase and Enzymes Catalyzing the Reactions A, B, E, and F

[0403] By the same method as in Example 5, the pBBR1MCS-2::ATCTOR1 PCK produced in Reference Example 5 was introduced into the EcΔPPG strain produced in Example 22, and the obtained E. coli mutant was designated as EcΔPPG/3HA1 PCK.

### Example 24

[0404] Production Test of 3-Hydroxyadipic Acid and α-Hydromuconic Acid Using an E. coli Mutant with Impaired Function of Both Pyruvate Kinase and a Phosphotransferase System Enzyme, and Carrying a Plasmid Expressing a PEP Carboxykinase and Enzymes Catalyzing the Reactions A, B, E, and F

[0405] By the same method as in Example 16, the production test of 3-hydroxyadipic acid and α-hydromuconic acid was conducted using the E. coli mutant produced in Example 23.

### Comparative Example 32

[0406] Production Test of 3-Hydroxyadipic Acid and α-Hydromuconic Acid Using an E. coli Mutant with Intact Pyruvate Kinase Function and Intact Phosphotransferase System Enzyme Function and Carrying a Plasmid Expressing a PEP Carboxykinase and Enzymes Catalyzing the Reactions A, B, E, and F

[0407] By the same method as in Comparative Example 15, the production test of 3-hydroxyadipic acid and α-hydromuconic acid was conducted using the Ec/3HA1 produced in Reference Example 9.

[0408] By comparing the results of Example 24 and Example 16, it was found that the yields of 3-hydroxyadipic acid and α-hydromuconic acid were further increased in the E. coli mutant with defects in the genes encoding pyruvate kinase and the phosphotransferase system enzyme and with enhanced activity of an enzyme that catalyzes the reaction of reducing 3-oxoadipyl-CoA to 3-hydroxyadipyl-CoA. Additionally, by comparing the results of Example 24 and Comparative Example 32, it was found that the yields of acetic acid and ethanol, both of which were generated by conversion of acetyl-CoA, were also increased in the mutant with defects in the genes encoding pyruvate kinase and the phosphotransferase system enzyme.

TABLE 26

| | | | | Yield of | Yield of | Yield of |
|---|---|---|---|---|---|---|
| | | Yield of | Yield of | succinic | acetic | ethanol |
| | Strain | 3HA (%) | HMA (%) | acid (%) | acid (%) | (%) |
| Example 24 | EcΔPPG/3HA1PCK | 18.0 | 0.0596 | 57.4 | 53.9 | 42.4 |
| Comparative | Ec/3HA1PCK | 0.963 | 0.0116 | 20.0 | 33.4 | 38.5 |
| Example 32 | | | | | | |

1. A genetically modified microorganism with an ability to produce 3-hydroxyadipic acid, α-hydromuconic acid, and/or adipic acid, in which the function of pyruvate kinase is impaired and the activities of phosphoenolpyruvate carboxykinase and of an enzyme that catalyzes a reaction to reduce 3-oxoadipyl-CoA to 3-hydroxyadipyl-CoA are enhanced.

2. The genetically modified microorganism according to claim 1, wherein the function of a phosphotransferase system enzyme is further impaired.

3. The genetically modified microorganism according to claim 1, wherein the enzyme that catalyzes a reaction to reduce 3-oxoadipyl-CoA to 3-hydroxyadipyl-CoA is any one of the following polypeptides (a) to (c):
(a) a polypeptide composed of an amino acid sequence represented by any one of SEQ ID NOs: 1 to 7;
(b) a polypeptide composed of the same amino acid sequence as that represented by any one of SEQ ID NOs: 1 to 7, except that one or several amino acids are substituted, deleted, inserted, and/or added, and having an enzymatic activity that catalyzes a reaction to reduce 3-oxoadipyl-CoA to 3-hydroxyadipyl-CoA;
(c) a polypeptide composed of an amino acid sequence with a sequence identity of not less than 70% to the sequence represented by any one of SEQ ID NOs: 1 to 7 and having an enzymatic activity that catalyzes a reaction to reduce 3-oxoadipyl-CoA to 3-hydroxyadipyl-CoA.

4. A method of producing 3-hydroxyadipic acid, α-hydromuconic acid, and/or adipic acid, comprising the step of culturing the genetically modified microorganism according to claim 1.

The application's sequence listing, which the Patent Office published only in electronic form, follows.

SEQUENCE LISTING (251 sequences)

SEQ ID NO: 1 - protein, 509 aa, Serratia marcescens ATCC13880
MAESNAAIQSAAIIGAGTMGRGIAYLFAQKGIRTVLYNRNGNTLNQAREYIAQDLNKKVEQGKIALQDKGAVLANLMFTSVFEAIADSELVIETIAEQEQTKLEVLAAIAAVVKPDTLIATNTSSLSLNKLATAVTHSERFIGLHFFNPAPLMKLIEIIPAYFTAHATTERCRQLVAALGKHDVVCQATPGFIVNRMARPYYLEGFRLLEEHVARAAQIDRALKAGGRFRMGPLELTDFIGQDINYQVSRQIWQDMQYDPRYTPGHLQRSLVDAGLLGKKNGRSYFAAEETAPPVTAASNADVETLRVYGEHPFFTLLQQRAALQWPQLRVEQRPALPGLGSAVQINDAFTVSITDGRTASQLAEQTAADAFVVDVALNYADTTYLAAAHSRHASAANKALFLRLLHTAIPQVEFIKDSPALIVARVLSSLINESVIMVESGVCSREDIDVAAVAGVNYAGGIFDWLGKLGEKNVRTTLSNLAQLLHAARYAPHYTLLHAAQPALTTTP

SEQ ID NO: 2 - protein, 509 aa, Serratia nematodiphila DSM21420
MAESNAAIQSAAIIGAGTMGRGIAYLFAQKGIPTMLYNRNGNTLNQAREYIAQDLNKKVEQGKIALRDKDAVLANLMFTSVFEAIADSELVIETIAEQEQTKLEVLAAIAAVVKPDTLIATNTSSLSLNKLATAVTHSERFIGLHFFNPAPLMKLIEIIPAYFTAHATTERCRQLVAALGKRDVVCQATPGFIVNRMARPYYLEGFRLLEEHVARAAQIDRALKAGGRFRMGPLELTDFIGQDINYQVSRQIWQDMQYDPRYTPGHLQRSLVDAGLLGKKNGRSYFAAEETAPPVTAANNADVETLRVYGEHPFFTLLQQRAALQWPQLRVEQRPALPGLGAAVQINDAFTVSITDGRTASQLAEQTAADAFVVDLALNYADTTYLVAAHSRHASAANKALFLRLLHTAIPQVEFIKDSPALIVARVLSSLINESVIMVESGVCSREDIDVAAVAGVNYAGGIFDWLGKLGEKNVRTTLSNLAQLLHAARYAPHYTLLHAAQPALTTTP

SEQ ID NO: 3 - protein, 509 aa, Serratia plymuthica NBRC102599
MAENNSAIRSAAVIGAGTMGRGIAYLLALNGIRTVLYNRNGNNLNQARDYIVSDLDRKIDNGKITLQKKGQILANIIFSDVFDAITDSDLVIETIAEDEQTKHEILAAIAATVKPEAIIATNTSSLSLNKLAAGVENNPRFIGLHFFNPAPLMKLIEIIPSYFTSRATSLRCQQLVTALGKQFVVCKATPGFIVNRMARPFYLEGFRLLEENVALAPQIDRALKAGGHFRMGPLELTDFIGQDINYQVSKQIWQDMQFDPRYTPGHLQRSLVDAGLLGRKNGRSFFASQPATPPNPTTEGDTPTSLHFYGEHALFDHLQQRALATWPALRVQRLPERPELGRFILVNNRLAIKITDGRTANLLAGLTALDTFVIDAALNYADTAYLVAAHNQHATETNKALFLTLLQTLIAQVEFIKDSPALIVARVLSSLINESVIMVESGVCSRADIDIAAVAGVNYADGIFAWLAQLGQKNVKSTLDNMAQLLHSTRYYPHYSLLNAARPELAVAP

SEQ ID NO: 4 - protein, 509 aa, Serratia proteamaculans 568
MAENNSAIHSVAVIGAGTMGRGIAYLLAQNGIRTLLYNRSGNNLNQARDYIIRDLDKKIDGGKISPQKKGEILANLVFSPIFEAIADSDLVIETIAEHEATKHEILAAIAATVKKEAIIATNTSSLSLNKLAAGVENNARFIGLHFFNPAPLMKLIEIIPSYFTSRATSLRCQQLVTAIGKQFVVCKATPGFIVNRMARPFYLEGFRLLEENVALAPQIDRALKAGGHFRMGPLELTDFIGQDINYQVSSQIWQDMQYDPRYTPGHLQRSLVDAGLLGKKNGRSFFTPSSAEPSSADAGSGTPTSLNFYGEHPLFDLLQQRALALWPRVQINRQSEQPTLGRFIRVNDAMAIKITDGRTANLLAELTELDTFVIDAALNYADTAYLAAAHSQDASAANKALFLTLLQTLIPQVEFIKDSPGLIVARVLSSLINESVIMVESGVCSRADIDIAAVAGVNYADGIFSWLAQLGQKNVKSTLDNMAQLLHSARYYPHYSLLNTPRPELAVAP

SEQ ID NO: 5 - protein, 509 aa, Serratia ureilytica Lr5/4
MAESNAAIQSAAIIGAGTMGRGIAYLLAQKSIRTVLYNRNGNTLNQARDAIVQDLNKKVEQGKLALQDKDAVLANLTFSAEFGAIADSDLVIETIAEHEQAKLEVLAAIAATVKPDTLIATNTSSLSLNKLATAVTHSERFIGLHFFNPAPLMKLIEIIPAYFTAQVTTERCRQLVAALGKRDVVCQATPGFIVNRMARPYYLEGFRLLEEHVARAPQIDRALKAGGHFRMGPLELTDFIGQDINYQVSRQIWQDMQYDPRYTPGHLQRSLVDAGLLGKKNGRSYFSAEESPPPLAAAVDAEVETLRIYGEHPLFTLLQQRATLQWPRLRVEQRPTLPGLGAAIQVNDAFTVSVTDGRTANQLAEQTAADAFVVDVALNYGDTAYLVAAHSRHASAANKALFLRLLHTAIPQVEFIKDSPALIVARVLSSLINESVIMVESGVCSREDIDVAAVAGVNYADGIFGWLTRLGEENVRTTLSNLAQLLHAARYAPHYTLLHAAQPALTTTP

SEQ ID NO: 6 - protein, 509 aa, Serratia sp. BW106
MAENNSAIHSVAVIGAGTMGRGIAYLLAQNGIRTLLYNRSGNNLDQARDYIIRDLDKKIDNGKISQQKKGEVLANLVFSPIFDAIADSDLVIETIAEHETTKHEILAAIAATVKQEAIIATNTSSLSLNKLAAGVENNARFIGLHFFNPAPLMKLIEIIPSYFTSRATSLRCQQLVTALGKQFVVCKATPGFIVNRMARPFYLEGFRLLEENVALAPQIDRALKAGGHFRMGPLELTDFIGQDINYQVSSQIWQDMQYDPRYTPGHLQRSLVDAGLLGKKNGRSFFAAPSSESNPLDAGNGTLTSLHFYGEHTLFDLLQQRALAIWPTLQIIHQPERPTLGRFIRVNDALAVKITDGRTANLLAELTDLDTFVIDAALNYSDTAYLVAAHNQDAAEANKALFLSLLQTLIPQVEFIKDSPGLIVARVLSSLINESVIMVESGVCSRADIDIAAVAGVNYADGIFAWLTQLGQKNVKSTLDNMAQLLHSARYYPHYSLLNAPRPELAVAP

SEQ ID NO: 7 - protein, 509 aa, Serratia liquefaciens FK01
MAENNTAIDSVAVIGAGTMGRGIAYLLALNGIRTLLYNRNGNHLNQARDYIVGDLDKKIDNGKISQQKKGEVLANLVFSPVFDAIADSDLVIETIAEHEPTKHEILAAIAATVKKEAIIATNTSSLSLNKLAAGIENNSRFIGLHFFNPAPLMKLIEIIPSYFTARATTLRCQQLVTAIGKKFVVCKATPGFIVNRMARPFYLEGFRLLEENVALAPQIDRALKAGGHFRMGPLELTDFIGQDINYQVSSQIWQDMQYDPRYTPGHLQRSLVDAGLLGKKNGRSFFSPSADAANPPATGGGTLSSLHFFGEHPLFDLLQQHAFATWAPLAITRQPEHPVLGRFIQVNDSLAVKITDGRTANQLAELAGLDTFVVDVALNYANTAFLVAAHSQQATEANKELFLTLLQTVIPQVEFVKDSPGLIVARVLSSLINESVIMVESGVCSREDIDIAAVAGVNYADGIFAWLAQLGQKNVKSTLDNMAQLLHSARYYPHYSLLHATRPELAVAP

SEQ ID NO: 8 - protein, 509 aa, Serratia sp. S119
MAESNAAIQSAAIIGAGTMGRGIAYLFAQKGIRTVLYNRNGNTLNQAREYIAQDLNKKVEQGKIALQDKGAVLANLVFTSVFETIADSDLVIETIAEQEQTKLEVLAAIAAAVKPDTLIATNTSSLSLNKLATAVTHSERFIGLHFFNPAPLMKLIEIIPAYFTARATTERCRQLVAALGKRDVVCQATPGFIVNRMARPYYLEGFRLLEEHVARAPQIDRALKAGGHFRMGPLELTDFIGQDINYQVSRQIWQDMQYDPRYTPGHLQRSLVDAGLLGKKNGRSYFAAEENALPVTAATDADVETLRVYGEHPFFTLLQQRAALQWPRLRVEQRPALPGLGPAVQINEAFTVSVTDGRTASQLAELTAADAFVVDVALNYADTAYLVAAHNRHASAANKALFLRLLHTAIPQVEFIKDSPALIVARVLSSLINESVIMVESGVCSREDINVAAVAGVNYADGIFGLLDSLGEKNVRTTLSNLAQLLHAARYAPHYTLLHAAQPALTTTP

SEQ ID NO: 9 - protein, 509 aa, Serratia sp. YD25
MAERNAAIQSAAIIGAGTMGRGIAYLFAQKGIRTVLYNRNGNTLIQAREYIVQDLDKKVEQGRLAPQDKDAVLANLQFSSVFEAIVDSDLVLETIAEQEQAKLEVLAAIAAAVKPDTLIATNTSSLSLNKLATAVTHSERFIGLHFFNPAPLMKLIEIIPAYFTTQATTERCRQLVAALGKRDVVCQATPGFIVNRMARPYYLEGFRLLEEHVARAPQIDRALKAGGHFRMGPLELTDFIGQDINYQVSRQIWQDMQYDPRYTPGHLQRSLVDAGLLGKKNGRSYFSAEETAPPVEAAAEADVETLRIYGEHPLFTLLQQRAALQWPQLRVEQRPALSGLGAAIQVNDAFTVSVTDGRTANQLAEQTAADAFVVDVALNYADTAYLVAAHSRHASAANKALFLRLLHTALPQVEFIKDSPALIVARVLSSLINESVIMVESGVCSREDIDVAAVAGVNYADGIFGWLTRLGEKNVRTTLSNLAQLLHAARYAPHYTLLHAAQPALTTTP

SEQ ID NO: 10 - protein, 509 aa, Serratia sp. FS14
MAESNAAIQSAAIIGAGTMGRGIAYLFAQKGIPTMLYNRNGNTLNQAREYIAQDLNKKVEQGKIALQDKDAVLANLMFTSVFEAIADSELVIETIAEQEQTKLEVLAAIAAVVKPDTLIATNTSSLSLNKLATAVTHSERFIGLHFFNPAPLMKLIEIIPAYFTAHATTERCRQLVAALGKRDVVCQATPGFIVNRMARPYYLEGFRLLEEHVARAAQIDRALKAGGRFRMGPLELTDFIGQDINYQVSRQIWQDMQYDPRYTPGHLQRSLVDAGLLGKKNGRSYFAAEETAPPVTAANNADVETLRVYGEHPFFTLLQQRAALQWPQLRVEQRPALPGLGAAVQINDAFTVSITDGRTASQLAEQTAADAFVVDVALNYADTTYLVAAHSRHASAANKALFLRLLHTAIPQVEFIKDSPALIVARVLSSLINESVIMVESGVCSREDIDVAAVAGVNYAGGIFDWLGKLGEKNVRTTLSNLAQLLHAARYAPHYTLLHAAQPALTTTP

SEQ ID NO: 11 - protein, 509 aa, Serratia sp. HMSC15F11
MAESNAAIQSAAIIGAGTMGRGIAYLFAQKGIRTVLYNRNGNTLNQARDYIELDLNKKVEQGKIALQDKGAVLANLVFTSVFETIADSELVIETIAEQEQTKLEVLAAIAAAVKPDTLIATNTSSLSLNKLATAVTHSERFIGLHFFNPAPLMKLIEIIPAYFTAHATTERCRQLVAALGKRDVVCQATPGFIVNRMARPYYLEGFRLLEEHVARAPQIDRALKAGGHFRMGPLELTDFIGQDINYQVSRQIWQDMQYDARYTPGHLQRSLVDAGLLGKKNGRSYFAVEENAPPVMAATDADIETLHVYGEHPFFTLLQQRAALQWPQLRVEQRPALPGLGPAVRINDAFTVSITDGRTANQLAEQTAADAFVVDVALNYADTAYLVAAHSRHASAANKALFLRLLHTAIPQVEFIKDSPALIVARVLSSLINESVIMVESGVCSREDIDVAAVAGVNYADGIFGWLDSLGEKNVRTTLSNLAQLLHAARYAPHYTLLHAAQPALTTTP

SEQ ID NO: 12 - protein, 509 aa, Serratia sp. JKS000199
MAESNAAIQSAAIIGAGTMGRGIAYLLAQKSIRTVLYNRNGNTLNQARDAIVQDLNKKVEQGKLALQDKDAVLANLTFSTEFGAIADSDLVIETIAEHEQAKLEVLAAIAATVKPDTLIATNTSSLSLNKLATAVTHSERFIGLHFFNPAPLMKLIEIIPAYFTAQVTTERCRQLVAALGKRDVVCQATPGFIVNRMARPYYLEGFRLLEEHVARAPQIDRALKAGGHFRMGPLELTDFIGQDINYQVSRQIWQDMQYDPRYTPGHLQRSLVDAGLLGKKNGRSYFSAEESPPPLAAAVDAEVETLRIYGEHPLFTLLQQRAALQWPRLRVEQRPTLPGLGAAIQVNDAFTVSVTDGRTANQLAEQTAADAFVVDVALNYGDTAYLVAAHSRHASAANKALFLRLLHTAIPLVEFIKDSPALIVARVLSSLINESVIMVESGVCSREDIDVAAVAGVNYADGIFGWLTRLGEENVRTTLSNLAQLLHAARYAPHYTLLHAAQPALTTTP

SEQ ID NO: 13 - protein, 509 aa, Serratia sp. TEL
MAESNAAIQSAAIIGAGTMGRGIAYLLAQKSIRTVLYNRNGNTLNQARDAIVQDLNKKVEQGKLALQDKDAVLANLTFSAEFGAIADSDLVIETIAEHEQAKLEVLAAIAATVKPDTLIATNTSSLSLNKLATAVTHSERFIGLHFFNPAPLMKLIEIIPAYFTAQVTTERCRQLVAALGKRDVVCQATPGFIVNRMARPYYLEGFRLLEEHVARAPQIDRALKAGGHFRMGPLELTDFIGQDINYQVSRQIWQDMQYDPRYTPGHLQRSLVDAGLLGKKNGRSYFSAEESPPPLAAAVDAEVETLRIYGEHPLFTLLQQRATLQWPRLRVEQRPTLPGLGAAIQVNDAFTVSVTDGRTANQLAEQTAADAFVVDVALNYGDTAYLVAAHSRHASAANKALFLRLLHTAIPQVEFIKDSPALIVARVLSSLINESVIMVESGVCSREDIDVAAVAGVNYADGIFGWLTRLGEENVRATLSNLAQLLHAARYAPHYTLLHAAQPALTTTP

SEQ ID NO: 14 - protein, 509 aa, Serratia sp. ISTD04
MAESNAAIQSAAIIGAGTMGRGIAYLLAQKSIRTVLYNRNGNTLNQARDAIVQDLNKKVEQGKLALQDKDAVLANLTFSAEFGVIADSDLVIETIAEHEQAKLEVLAAIAATVKSDTLIATNTSSLSLNKLATAVTHSERFIGLHFFNPAPLMKLIEIIPAYFTAQVTTERCRQLVAALGKRDVVCQATPGFIVNRMARPYYLEGFRLLEEHVARAPQIDRALKAGGHFRMGPLELTDFIGQDINYQVSRQIWQDMQYDPRYTPGHLQRSLVDAGLLGKKNGRSYFSAEESPPPLAAAVDAEVETLRIYGEHPLFTLLQQRAALQWPRLRVEQRPTLPGLGAAIQVNDAFTVSVTDGRTANQLAEQTAADAFVVDVALNYGDTAYLVAAHSRHASAANKALFLRLLHTAIPQVEFIKDSPALIVARVLSSLINESVIMVESGVCSREDIDVAAVAGVNYADGIFGWLTRLGEENVRTTLSNLAQLLHAARYAPHYTLLHAAQPALTTTP

SEQ ID NO: 15 - protein, 509 aa, Serratia sp. SCBI
MAESNAAIQSAAIIGAGTMGRGIAYLLAQKSIRTVLYNRNGNTLNQARDAIVQDLNKKVEQGKLALQDKDAVLANLTFSAEFGAIADSDLVIETIAEHEQAKLEVLAAIAATVKPDTLIATNTSSLSLNKLATAVTHSERFIGLHFFNPAPLMKLIEIIPAYFTAQVTTERCRQLVAALGKRDVVCQATPGFIVNRMARPYYLEGFRLLEEHVARAPQIDRALKAGGHFRMGPLELTDFIGQDINYQVSRQIWQDMQYDPRYTPGHLQRSLVDAGLLGKKNGRSYFSTEESPPPLAAAVDAEVETLRIYGEHPLFTLLQQRAALQWPRLRVEQRPTLPGLGAAIQVNDAFTVSVTDGRTANQLAEQTAADAFVVDVALNYGDTAYLVAAHSRHASAANKALFLRLLHTAIPQVEFIKDSPALIVARVLSSLINESVIMVESGVCSREDIDVAAVAGVNYADGIFGWLTRLGEENVRTTLSNLAQLLHAARYAPHYTLLHAAQPALTTTP

SEQ ID NO: 16 - protein, 509 aa, Serratia sp. S4
MAENNSAIHSVAVIGAGTMGRGIAYLLAQNGIRTLLYNRSGNNLNQARDYIIRDLDKKIDGGKISLQKKGEILANLVFSPIFEAIADSDLVIETIAEHESTKHEILSAIAATVKKEAIIATNTSSLSLNKLAAGVENNARFIGLHFFNPAPLMKLIEIIPSYFTSRATSLRCQQLVTVIGKQFVVCKATPGFIVNRMARPFYLEGFRLLEENVALAPQIDRALKAGGHFRMGPLELTDFIGQDINYQVSSQIWQDMQYDPRYTPGHLQRSLVDAGLLGKKNGRSFFTPSSATPSSADAGSGTPTSLNFYGEHPLFDLLQQRALALWPRLQINRQSEQPTLGRFIRVNDAMAIKITDGRTANLLAELTELDTFVIDAALNYADTAYLAAAHSQDASTANKALFLTLLQTLIPQVEFIKDSPGLIVARVLSSLINESVIMVESGVCSRADIDIAAVAGVNYADGIFSWLAQLGQKNVKSTLDNMAQLLHSARYYPHYSLLNTPRPELAVAP

SEQ ID NO: 17 - protein, 509 aa, Serratia sp. C-1
MAENNSAIRSAAVIGAGTMGRGIAYLLALNGIRTVLYNRNGNNLNQARDYIVSDLDRKIDNGKITLQKKGQILANIIFSAVFDAITDSDLVIETIAEDEQTKHEILAAIAATVKPEAIIATNTSSLSLNKLAAGVENNPRFIGLHFFNPAPLMKLIEIIPSYFTSHATSLRCQKLVIALGKQFVVCKATPGFIVNRMARPFYLEGFRLLEENVALAPQIDRALKAGGHFRMGPLELTDFIGQDINYQVSKQIWQDMQFDPRYTPGHLQRSLVDAGLLGRKNGRSFFASQPATPPTPTTESDTPTSLHFYGEHALFDHLQQRALAAWPALRVQRLPERPELGRFILVNNALAIKITDGRTANLLAGLTALDTFVIDAALNYADTAYLVAAHNQHATETNKALFLTLLQTVIAQVEFIKDSPALIVARVLSSLINESVIMVESGVCSRADIDIAAVAGVNYADGIFAWLAQLGQKNVKSTLDNMAQLLHSARYYPHYSLLNAARPELAVAP

SEQ ID NO: 18 - protein, 509 aa, Serratia marcescens 532
MAESNAAIQSAAIIGAGTMGRGIAYLFAQKGIRTVLYNRNGNTLNQAREYIAQDLNKKVEQGKIALQDKGAVLANLMFTSVFEAITDSELVIETIAEQEQTKLEVLAAIAAVVKPDTLIATNTSSLSLNKLATAVTHSERFIGLHFFNPAPLMKLIEIIPAYFTAHATTERCRQLVAALGKHDVVCQATPGFIVNRMARPYYLEGFRLLEEHVARAAQIDRALKAGGRFRMGPLELTDFIGQDINYQVSRQIWQDMQYDPRYTPGHLQRSLVDAGLLGKKNGRSYFAAEETAPPVTAASNADVETLRVYGEHPFFTLLQQRAALQWPQLRVEQRPALPGLGSAVQINDAFTVSITDGRTASQLAEQTAADAFVVDVALNYADTTYLAAAHSRHASAANKALFLRLLHTAIPQVEFIKDSPALIVARVLSSLINESVIMVESGVCSREDIDVAAVAGVNYAGGIFDWLGKLGEKNVRTTLSNLAQLLHAARYAPHYTLLHAAQPALTTTP

SEQ ID NO: 19 - protein, 509 aa, Serratia marcescens 2880STDY5683033
MAESNAAIQSAAIIGAGTMGRGIAYLFAQKGIRTVLYNRNGNTLNQAREYIAHDLNKKVEQGKIALQDKGAVLANLMFTSVFEAIADSELVIETIAEQEQTKLEVLAAIAAVVKPDTLIATNTSSLSLNKLATAVTHSERFIGLHFFNPAPLMKLIEIIPAYFTAHATTERCRQLVAALGKHDVVCQATPGFIVNRMARPYYLEGFRLLEEHVARAAQIDRALKAGGRFRMGPLELTDFIGQDINYQVSRQIWQDMQYDPRYTPGHLQRSLVDAGLLGKKNGRSYFATEETAPPVTAASNADVETLRVYGEHPFFTLLQQRAALQWPQLRVEQRPALPGLGSAVQINDAFTVSITDGRTASQLAEQTAADAFVVDVALNYADTTYLAAAHSRHASAANKALFLRLLHTAIPQVEFIKDSPALIVARVLSSLINESVIMVESGVCSREDIDVAAVAGVNYAGGIFDWLGKLGEKNVRTTLSNLAQLLHAARYAPHYTLLHAAQPALTTTP

SEQ ID NO: 20 - protein, 509 aa, Serratia marcescens WW4
MAESNAAIQSAAIIGAGTMGRGIAYLFAQKGIPTMLYNRNGNTLNQAREYIAQDLNKKVEQGKIALQDKDAVLANLMFTSVFEAIADSELVIETIAEQEQTKLEVLAAIAAVVKPDTLIATNTSSLSLNKLATAVTHSERFIGLHFFNPAPLMKLIEIIPAYFTAHATTERCRQLVAALGKRDVVCQATPGFIVNRMARPYYLEGFRLLEEHVARAAQIDRALKAGGRFRMGPLELTDFIGQDINYQVSRQIWQDMQYDPRYTPGHLQRSLVDAGLLGKKNGRSYFAAEETAPPVTAANNADVETLRVYGEHPFFTLLQQRAALQWPQLRVEQRPALPGLGAAVQINDAFTVSITDGRTASQLAEQTAADAFVIDVALNYADTTYLVAAHSRHASAANKALFLRLLHTAIPQVEFIKDSPALIVARVLSSLINESVIMVESGVCSREDIDVAAVAGVNYAGGIFDWLGKLGEKNVRTTLSNLAQLLHAARYAPHYTLLHAAQPALTTTP

SEQ ID NO: 21 - protein, 509 aa, Serratia marcescens K27
MAESNAAIQSAAIIGAGTMGRGIAYLFAQKGIPTMLYNRNGNTLNQAREYIAQDLNKKVEQGKIALQDKDAVLANLMFTSVFEAIADSELVIETIAEQEQTKLEVLAAIAAVVKPDTLIATNTSSLSLNKLATAVTHSERFIGLHFFNPAPLMKLIEIIPAYFTAHATTERCRQLVAALGKRDVVCQATPGFIVNRMARPYYLEGFRLLEEHVARSAQIDRALKAGGRFRMGPLELTDFIGQDINYQVSRQIWQDMQYDPRYTPGHLQRSLVDAGLLGKKNGRSYFAAEETAPPVTAANNADVETLRVYGEHPFFTLLQQRAALQWPQLRVEQRPALPGLGAAVQINDAFTVSITDGRTASQLAEQTAADAFVVDVALNYADTTYLVAAHSRHASAANKALFLRLLHTAIPQVEFIKDSPALIVARVLSSLINESVIMVESGVCSREDIDVAAVAGVNYAGGIFDWLGKLGERNVRTTLSNLAQLLHAARYAPHYTLLHAAQPALTTTP

SEQ ID NO: 22 - protein, 509 aa, Serratia marcescens 280
MAESNAAIQSAAIIGAGTMGRGIAYLFAQKGIPTMLYNRNGNTLNQAREYIAQDLNKKVEQGKIALQDKDAVLANLMFTSVFEAIADSELVIETIAEQEQTKLEVLAAIAAVVKPDTLIATNTSSLSLNKLATAVTHSERFIGLHFFNPAPLMKLIEIIPAYFTAHATTERCRQLVAALGKRDVVCQATPGFIVNRMARPYYLEGFRLLEEHVARAAQIDRALKAGGRFRMGPLELTDFIGQDINYQVSRQIWQDMQYDPRYTPGHLQRSLVDAGLLGKKNGRSYFAAEETAPPVTAANNADVETLRVYGEHPFFTLLQQRAALQWPQLRVEQRPALPGLGAAVQINDAFTVSITDGRTASQLAEQTAADAFVVDVALNYADTTYLVAAHSRHASAANKALFLLLLHTAIPQVEFIKDSPALIVARVLSSLINESVIMVESGVCSREDIDVAAVAGVNYAGGIFDWLGKLGEKNVRTTLSNLAQLLHAARYAPHYTLLHAAQPALTTTP

SEQ ID NO: 23 - protein, 509 aa, Serratia marcescens 19F
MAESNAAIQSAAIIGAGTMGRGIAYLFAQKGIPTMLYNRNGNTLNQAREYIAQDLNKKVEQGKIALQDKDAVLANLMFTSVFEAIADSELVIETIAEQEQTKLEVLAAIAAVVKHDTLIATNTSSLSLNKLATAVTHSERFIGLHFFNPAPLMKLIEIIPAYFTAHATTERCRQLVAALGKRDVVCQATPGFIVNRMARPYYLEGFRLLEEHVARAAQIDRALKAGGRFRMGPLELTDFIGQDINYQVSRQIWQDMQYDPRYTPGHLQRSLVDAGLLGKKNGRSYFAAEETAPPVTAANNADVETLRVYGEHPFFTLLQQRAALQWPQLRVEQRPALPGLGAAVQINDAFTVSITDGRTASQLAEQTAADAFVVDVALNYADTTYLVAAHSRHASAANKALFLRLLHTAIPQVEFIKDSPALIVARVLSSLINESVIMVESGVCSREDIDVAAVAGVNYAGGIFDWLGKLGEKNVRTTLSNLAQLLHAARYAPHYTLLHAAQPALTTTP

SEQ ID NO: 24 - protein, 509 aa, Serratia marcescens 1185
MAESNAAIQSAAIIGAGTMGRGIAYLFAQKGIPTMLYNRNGNTLNQAREYIAQDLNKKVEQGKIALRDKDAVLANLMFTSVFEAIADSELVIETIAEQEQTKLEVLAAIAAVVKPDTLIATNTSSLSLNKLATAVTHSERFIGLHFFNPAPLMKLIEIIPAYFTAHATTERCRQLVAALGKHDVVCQATPGFIVNRMARPYYLEGFRLLEEHVARAAQIDRALKAGGRFRMGPLELTDFIGQDINYQVSRQIWQDMQYDPRYTPGHLQRSLVDAGLLGKKNGRSYFAAEETAPPVTAANNADVETLRVYGEHPFFTLLQQRAALQWPQLRVEQRPALPGLGAAVQINDAFTVSITDGRTASQLAEQTAADAFVVDLALNYADTTYLVAAHSRHASAANKALFLRLLHTAIPQVEFIKDSPALIVARVLSSLINESVIMVESGVCSREDIDVAAVAGVNYAGGIFDWLGKLGEKNVRTTLSNLAQLLHAARYAPHYTLLHAAQSALTTTP

SEQ ID NO: 25 - protein, 509 aa, Serratia marcescens S2I7
MAESNAAIQSAAIIGAGTMGRGIAYLFAQKGIPTMLYNRNGNTLNQAREYIAQDLNKKVEQGKIALQDKDAVLANLMFTSVFEAIADSELVIETIAEQEQTKLEVLAAIAAVVKPDTLIATNTSSLSLNKLATAVTHSERFIGLHFFNPAPLMKLIEIIPAYFTAHATTERCRQLVAALGKRDVVCQATPGFIVNRMARPYYLEGFRLLEEHVARAAQIDRALKAGGRFRMGPLELTDFIGQDINYQVSRQIWQDMQYDPRYTPGHLQRSLVDAGLLGKKNGRSYFAAEETAPPVTAANNADVETLRVYGEHPFFTLLQQRAALQWPQLCVEQRPALPGLGAAVQINDAFTVSITDGRTASQLAEQTAADAFVVDVALNYADTTYLVAAHSRHASAANKALFLRLLHTAIPQVEFIKDSPALIVARVLSSLINESVIMVESGVCSREDIDVAAVAGVNYAGGIFDWLGKLGERNVRTTLSNLAQLLHAARYAPHYTLLHAAQPALTTTP

SEQ ID NO: 26 - protein, 509 aa, Serratia marcescens KHCo-24B
MAESNAAIQSAAIIGAGTMGRGIAYLFAQKGIPTMLYNRNGNTLNQAREYIAQDLNKKVEQGKIALRDKDAVLANLMFTSVFEAIADSELVIETIAEQEQTKLEVLAAIAAVVKPDTLIATNTSSLSLNKLATAVTHSERFIGLHFFNPAPLMKLIEIIPAYFTAHATTERCRQLVAALGKRDVVCQATPGFIVNRMARPYYLEGFRLLEEHVARAAQIDRALKAGGRFRMGPLELTDFIGQDINYQVSRQIWQDMQYDPRYTPGHLQRSLVDAGLLGKKNGRSYFAAEETAPPVTAANNADVETLRVYGEHPFFTLLQQRAALQWPQLRVEQRPALPGLGAAVQINDAFTVSITDGRTASQLAEQAAADAFVVDLALNYADTTYLVAAHSRHASAANKALFLRLLHTAIPQVEFIKDSPALIVARVLSSLINESVIMVESGVCSREDIDVAAVAGVNYAGGIFDWLGKLGEKNVRTTLSNLAQLLHAARYAPHYTLLHAAQPALTTTP

SEQ ID NO: 27 - protein, 509 aa, Serratia marcescens Z6
MAESNAAIQSAAIIGAGTMGRGIAYLFAQKGIPTMLYNRNGNTLNQAREYIAQDLNKKVEQGKIALQDKDAVLANLMFTSVFEAIADSELVIETIAEQEQTKLEVLAAIAAVVKPDTLIATNTSSLSLNKLATAVTHRERFIGLHFFNPAPLMKLIEIIPAYFTAHATTERCRQLVAALGKRDVVCQATPGFIVNRMARPYYLEGFRLLEEHVARAAQIDRALKAGGRFRMGPLELTDFIGQDINYQVSRQIWQDMQYDPRYTPGHLQRSLVDAGLLGKKNGRSYFAAEETAPPVTAANNADVETLRVYGEHPFFTLLQQRAALQWPQLCVEQRPALPGLGAAVQINDAFTVSITDGRTASQLAEQTAADAFVIDVALNYADTTYLVAAHSRHASAANKALFLRLLHTAIPQVEFIKDSPALIVARVLSSLINESVIMVESGVCSREDIDVAAVAGVNYAGGIFDWLGKLGEKNVRTTLSNLAQLLHAARYAPHYTLLHAAQPALTTTP

SEQ ID NO: 28 - protein, 509 aa, Serratia marcescens 546
MAESNAAIQSAAIIGAGTMGRGIAYLFAQKGIPTMLYNRNGNTLNQAREYIAQDLNKKVEQGKIALRDKDAVLANLMFTSVFEAIADSELVIETIAEQEQTKLEVLAAIAAVVKPDTLIATNTSSLSLNKLSTAVTHNERFIGLHFFNPAPLMKLIEIIPAYFTAHATTERCRQLVAALGKRDVVCQATPGFIVNRMARPYYLEGFRLLEEHVARAAQIDRALKAGGRFRMGPLELTDFIGQDINYQVSRQIWQDMQYDPRYTPGHLQRSLVDAGLLGKKNGRSYFAAEETAPPVTAANNADVETLRVYGEHPFFTLLQQRAALQWPQLRVEQRPALPGLGAAVRINDAFTVSITDGRTASQLAEQTAADAFVVDVALNYADTTYLVAAHSRHASAANKALFLRLLHTAIPQVEFIKDSPALIVARVLSSLINESVIMVESGVCSREDIDVAAVAGVNYAGGIFDWLGKLGEKNVRTTLSNLAQLLHAARYAPHYTLLHAAQPALTTTP

SEQ ID NO: 29 - protein, 509 aa, Serratia nematodiphila MB307
MAESNAAIQSAAIIGAGTMGRGIAYLFAQKGIPTMLYNRNGNTLNQAREYIAQDLNKKVEQGKIALRDKDAVLANLMFTSVFEAIADSELVIETIAEQEQTKLEVLAAIAAVVKPDTLIATNTSSLSLNKLATAVTHSERFIGLHFFNPAPLMKLIEIIPAYFTAHATTERCRQLVAALGKRDVVCQATPGFIVNRMARPYYLEGFRLLEEHVARAAQIDRALKAGGRFRMGPLELTDFIGQDINYQVSRQIWQDMQYDPRYTPGHLQRSLVDAGLLGKKNGRSYFAAEETAPQVTAANNADVETLRVYGEHPFFTLLQQRAALQWPQLRVEQRPALPGLGAAVQINDAFTVSITDGRTASQLAEQTAADAFVVDLALNYADTTYLVAAHSRHASAANKALFLRLLHTAIPQVEFIKDSPALIVARVLSSLINESVIMVESGVCSREDIDVAAVAGVNYAGGIFDWLGKLGEKNVRTTLSNLAQLLHAARYAPHYTLLHAAQPALTTTP

SEQ ID NO: 30 - protein, 509 aa, Serratia marcescens VGH107
MAESNAAIQSAAIIGAGTMGRGIAYLFAQKGIPTMLYNRNGNTLNQAREYIAQDLNKKVEQGKIALQDKDAVLANLMFTSVFEAIADSELVIETIAEQEQTKLEVLAAIAAVVKHDTLIATNTSSLSLNKLATAVTHSERFIGLHFFNPAPLMKLIEIIPAYFTAHATTERCRQLVAALGKRDVVCQATPGFIVNRMARPYYLEGFRLLEEHVARAAQIDRALKAGGRFRMGPLELTDFIGQDINYQVSRQIWQDMQYDPRYTPGHLQRSLVDAGLLGKKNGRSYFAAEETAPPVTAANNADVETLRVYGEHPFFTLLQQRAALQWPQLRVEQRPALPGLGAAVQINDAFTVSITDGRTASQLAEQTAADAFVVDVALNYADTTYLVAAHSRHASAANKALFLRLLHTAIPQVEFIKDSPALIVARVLSSLINESVIMVESGVCSREDIDVAAVAGVNYAGGIFDWLGKLGEKNVRTMLSNLAQLLHAARYAPHYNLLHAAQPALTTTP

SEQ ID NO: 31 - protein, 509 aa, Serratia marcescens MCB
MAESNAAIQSAAIIGAGTMGRGIAYLFAQKGIRTVLYNRNGNTLNQAREYIAQDLNKKVEQGKIALQDKSSVLANLVFSTALEAIADSELVIETIAEHEQTKLEVLAAIAAVVKPDTLIATNTSSLSLNKLATAVTHSERFIGLHFFNPAPLMKLIEIIPAYFTAHATTERCRQLVAALGKRDVVCQATPGFIVNRMARPYYLEGFRLLEEHVARAPQIDRALKAGGHFRMGPLELTDFIGQDINYQVSRQIWQDMQYDPRYTPGHLQRSLVDAGLLGKKNGRSYFTAEETAPPVTAAIGADVETLRIYGEHPFFTLLQQRAALQWPQLRVEQRPALPGVGPAVQINDAFTVSITDGRTASQLAEQTTADAFVVDIALNYADTAYLVAAHNRHASAANKALFLRLLHTAIPQVEFIKDSPALIVARVLSSLINESVIMVESGVCSREDIDVAAVAGVNYAGGIFDWLSKLGEKNVRTTLSNLAQLLHAARYAPHYTLLHAAQPALTTTP

SEQ ID NO: 32 - protein, 509 aa, Serratia marcescens AH0650
MAESNAAIQSAAIIGAGTMGRGIAYLFAQKGIRTVLYNRNGNTLNQAREYIAQDLNKKVEQGKIALQDKSSVLANLVFSTALEAIADSELVIETIAEHEQTKLEVLAAIAAVVKPDTLIATNTSSLSLNKLATAVTHSERFIGLHFFNPAPLMKLIEIIPAYFTAHATTERCRQLVAALGKRDVVCQATPGFIVNRMARPYYLEGFRLLEEHVARAPQIDRALKAGGHFRMGPLELTDFIGQDINYQVSRQIWQDMQYDPRYTPGHLQRSLVDAGLLGKKNGRSYFAAEETAPPVTAAIDADVETLRVYGEHPFFTLLQQRAARQWPQLRVEQRPALPSLGPAVQINDAFTVSITDGRTASQLAEQTTADAFVVDIALNYADTAYLVAAHNRYASAANKALFLRLLHTAIPQVEFIKDSPALIVARVLSSLINESVIMVESGVCSREDIDVAAVAGVNYAGGIFDWLGKLGEKNVRTTLSNLAQLLHAARYAPHYTLLHAAQPALTTTP

SEQ ID NO: 33 - protein, 509 aa, Serratia marcescens UMH12
MAESNAEIQSAAIIGAGTMGRGIAYLFAQKGIRTVLYNRNGNTLNQAREYIAQDLNKKVEQGKIALQDKSSVLANLVFSTALEAIADSELVIETIAEHEQTKLEVLAAIAAVVKPDTLIATNTSSLSLNKLATAVTHSERFIGLHFFNPAPLMKLIEIIPAYFTAHATTERCRQLVAALGKRDVVCQATPGFIVNRMARPYYLEGFRLLEEHVARAPQIDRALKAGGHFRMGPLELTDFIGQDINYQVSRQIWQDMQYDPRYTPGHLQRSLVDAGLLGKKNGRSYFAAEETAPPVTAAIDADVETLRVYGEHPFFTLLQQRAARQWPQLRVEQRPALPSLGPAVQINDAFTVSITDGRTASQLAEQTTADAFVVDIALNYADTAYLVAAHNRYASAANKALFLRLLHTAIPQVEFIKDSPALIVARVLSSLINESVIMVESGVCSREDIDVAAVAGVNYAGGIFDWLGKLGEKNVRTTLSNLAQLLHAARYAPHYTLLHAAQPALTTTP

SEQ ID NO: 34 - protein, 509 aa, Serratia sp. OMLW3
MAESNAAIQSAAIIGAGTMGRGIAYLFAQKGIRTVLYNRNGNTLNQAREYIAQDLNKKVEQGKIALQDKSSVLANLVFSTALVAIADSELVIETIAEHEQTKLEVLAAIAAVVKPDTLIATNTSSLSLNKLATAVTHSERFIGLHFFNPAPLMKLIEIIPAYFTAHATTERCRQLVAALGKRDVVCQATPGFIVNRMARPYYLEGFRLLEEHVARAPQIDRALKAGGHFRMGPLELTDFIGQDINYQVSRQIWQDMQYDPRYTPGHLQRSLVDAGLLGKKNGRSYFAAEETAPPVTAAIDADVETLRVYGEHPFFTLLQQRAARQWPQLRVEQRPALPSLGPAVQINDAFTVSITDGRTASQLAEQTTADAFVVDIALNYADTAYLVAAHNRYASAANKALFLRLLHTAIPQVEFIKDSPALIVARVLSSLINESVIMVESGVCSREDIDVAAVAGVNYAGGIFDWLGKLGEKNVRTTLSNLAQLLHAARYAPHYTLLHAAQPALTTTP

SEQ ID NO: 35 - protein, 509 aa, Serratia marcescens UMH11
MAESNAAIQSAAIIGAGTMGRGIAYLFAQKGIRTVLYNRSGNTLNQAREYIAQDLNKKVEQGKIALQDKSSVLANLVFSTALVAIADSELVIETIAEHEQTKLEVLAAIAAVVKPDTLIATNTSSLSLNKLATAVTHSERFIGLHFFNPAPLMKLIEIIPAYFTAHATTERCRQLVAALGKRDVVCQATPGFIVNRMARPYYLEGFRLLEEHVARAPQIDRALKAGGHFRMGPLELTDFIGQDINYQVSRQIWQDMQYDPRYTPGHLQRSLVDAGLLGKKNGRSYFAAEETAPPVTAAIDADVETLRVYGEHPFFTLLQQRAARQWPQLRVEQRPALPSLGPAVQINDAFTVSITDGRTASQLAEQTTADAFVVDIALNYADTAYLVAAHNRYASAANKALFLRLLHTAIPQVEFIKDSPALIVARVLSSLINESVIMVESGVCSREDIDVAAVAGVNYAGGIFDWLGKLGEKNVRTTLSNLAQLLHAARYAPHYTLLHAAQPALTTTP

SEQ ID NO: 36 - protein, 509 aa, Serratia marcescens UMH1
MAESNAAIQSAAIIGAGTMGRGIAYLFAQKGIRTVLYNRNGNTLNQAREYIAQDLNKKVEQGKIALQDKSSVLANLVFSTALEAIADSELVIETIAEHEQTKLEVLAAIAAVVKPDTLIATNTSSLSLNKLATAVTHSERFIGLHFFNPAPLMKLIEIIPAYFTAHATTERCRQLVAALGKRDVVCQATPGFIVNRMARPYYLEGFRLLEEHVARAPQIDRALKAGGHFRMGPLELTDFIGQDINYQVSRQIWQDMQYDPRYTPGHLQRSLVDAGLLGKKNGRSYFAAEETAPPVTAAIDADVETLRVYGEHPFFTLLQQQAARQWPQLRVEQRPALPSLGPAVQINGAFTVSITDGRTASQLAEQTTADAFVIDIALNYADTAYLVAAHNRYASAANKALFLRLLHTAIPQVEFIKDSPALIVARVLSSLINESVIMVESGVCSREDIDVAAVAGVNYAGGIFDWLGKLGEKNVRTTLSNLAQLLHAARYAPHYTLLHAAQPALTTTP

SEQ ID NO: 37 - protein, 509 aa, Serratia marcescens 2880STDY5683020
MAESNAAIQSAAIIGAGTMGRGIAYLFAQKGIRTVLYNRNGNTLNQAREYIAQDLNKKVEQGKIALQDKGAVLANLVFTSVFETIADSDLVIETIAEQEQTKLEVLAAIAAAVKPDTLIATNTSSLSLNKLATAVTHSERFIGLHFFNPAPLMKLIEIIPAYFTARATTERCRQLVAALGKRDVVCQATPGFIVNRMARPYYLEGFRLLEEHVARAPQIDRALKAGGHFRMGPLELTDFIGQDINYQVSRQIWQDMQYDPRYTPGHLQRSLVDAGLLGKKNGRSYFAAEENALPVTAATDADVETLRVYGEHPFFTLLQQRAALQWPRLRVEQRPALPGLGPAVQINEAFTVSVTDGRTASQLAEQTAADAFVVDVALNYADTAYLVAAHNRHASAANKALFLRLLHTAIPQVEFIKDSPALIVARVLSSLINESVIMVESGVCSREDIDVAAVAGVNYADGIFGWLDSLGEKNVRTTLSNLAQLLHAARYAPHYTLLHAAQPALTTTP

SEQ ID NO: 38 - protein, 509 aa, Serratia marcescens 99
MAESNAAIQSAAIIGAGTMGRGIAYLFAQKGIRTVLYNRNGNTLNQAREYIAQDLNKKVEQGKIALQDKGAVLANLVFTSVFETIADSDLVIETIAEQEQTKLEVLAAIAAAVKPDTLIATNTSSLSLNKLATAVTHSERFIGLHFFNPAPLMKLIEIIPAYFTARATTERCRQLVAALGKRDVVCQATPGFIVNRMARPYYLEGFRLLEEHVARAPQIDRALKAGGHFRMGPLELTDFIGQDINYQVSRQIWQDMQYDPRYTPGHLQRSLVDAGLLGKKNGRSYFAAEENALPVTAASNADVETLRVYGEHPFFTLLQQRAALQWPRLRVEQRPALPGLGPAVQINEAFTVSVTDGRTASQLAELTAADAFVVDVALNYADTAYLVAAHNRHASAANKALFLRLLHTAIPQVEFIKDSPALIVARVLSSLINESVIMVESGVCSREDIDVAAVAGVNYADGIFGWLDSLGEKNVRTTLSNLAQLLHAARYAPHYTLLHAAQPVLTTTP

SEQ ID NO: 39 - protein, 509 aa, Serratia marcescens 374
MAESNAAIQSAAIIGAGTMGRGIAYLFAQKGIRTVLYNRNGNTLNQAREYIAQDLNKKVEQGKIALQDKSSVLANLVFSTALVAIADSELVIETIAEHEQTKLEVLAAIAAVVKPDTLIATNTSSLSLNKLATAVTHSERFIGLHFFNPAPLMKLIEIIPAYFTAHATTERCRQLVAALGKRDVVCQATPGFIVNRMARPYYLEGFRLLEEHVARAPQIDRALKAGGHFRMGPLELTDFIGQDINYQVSRQIWQDMQYDPRYTPGHLQRSLVDAGLLGKKNGRSYFAAEETAPPVTAAIDADVETLRVYGEHPFFTLLQQQAARQWPQLRVEQRPALPSLGPAVQINGAFTVSITDGRTASQLAEQTTADAFVIDIALNYADTAYLVAAHNRYASAANKALFLRLLHTAIPQVEFIKDSPALIVARVLSSLINESVIMVESGVCSREDIDVAAVAGVNYAGGIFDWLGKLGEKNVRTTLSNLAQLLHAARYAPHYTLLHAAQPALTTTP

SEQ ID NO: 40 - protein, 509 aa, Serratia marcescens 2880STDY5683036
MAESNAAIQSAAIIGAGTMGRGIAYLFAQKGIRTVLYNRNGNTLNQAREYIAQDLNKKVEQGKIALQDKGAVLANLVFTSVFETIADSDLVIETIAEQEQTKLEVLAAIAAAVKPDTLLATNTSSLSLNKLATAVTHSERFIGLHFFNPAPLMKLIEIIPAYFTARATTERCRQLVAALGKRDVVCQATPGFIVNRMARPYYLEGFRLLEEHVARAPQIDRALKAGGHFRMGPLELTDFIGQDINYQVSRQIWQDMQYDPRYTPGHLQRSLVDAGLLGKKNGRSYFAAEENALPVTAASNADVETLRVYGEHPFFTLLQQRAALQWPRLRVEQRPALPGLGPAVQINEAFTVSVTDGRTASQLAELTAADAFVVDVALNYADTAYLVAAHNRHASAANKALFLRLLHTAIPQVEFIKDSPALIVARVLSSLINESVIMVESGVCSREDIDVAAVAGVNYADGIFGWLDSLGEKNVRTTLSNLAQLLHAARYAPHYTLLHAAQPVLTTTP

SEQ ID NO: 41 - protein, 509 aa, Serratia marcescens 2880STDY5683034
MAESNAAIQSAAIIGAGTMGRGIAYLFAQKGIRTVLYNRNGNTLNQAREYIAQDLNKKVEQGKIALQDKGAVLANLVFTSVFETIADSELVIETIAEQEQTKLEVLAAIAAAVKPDTLIATNTSSLSLNKLATAVTHSERFIGLHFFNPAPLMKLIEIIPAYFTARATTERCRQLVAALGKRDVVCQATPGFIVNRMARPYYLEGFRLLEEHVARAPQIDRALKAGGHFRMGPLELTDFIGQDINYQVSRQIWQDMQYDPRYTPGHLQRSLVDAGLLGKKNGRSYFAAEENALPVTAATDADVETLRIYGEHPFFTLLQQRAALQWPRLRVEQRPALPGLGPAVQINEAFTVSVTDGRTASQLAELTAADAFVVDVALNYADTAYLVAAHNRHASAANKALFLRLLHTAIPQVEFIKDSPALIVARVLSSLINESVIMVESGVCSREDIDVAAVAGVNYADGIFGWLDNLGEKNVRTTLSNLAQLLHAARYAPHYTLLHAAQPALTTTP

SEQ ID NO: 42 - protein, 509 aa, Serratia marcescens 2880STDY5682892
MAESNAAIQSAAIIGAGTMGRGIAYLFAQKGIRTVLYNRNGNTLNQAREYIAQDLNKKVEQGKIALQDKGAVLANLVFTSVFETIADSDLVIETIAEQEQTKLEVLAAIAAAVKPDTLIATNTSSLSLNKLATAVTHSERFIGLHFFNPAPLMKLIEIIPAYFTARATTERCRQLVAALGKRDVVCQATPGFIVNRMARPYYLEGFRLLEEHVARAPQIDRALKAGGHFRMGPLELTDFIGQDINYQVSRQIWQDMQYDPRYTPGHLQRSLVDAGLLGKKNGRSYFAAEENALPVTAATDADVETLRVYGEHPFFTLLQQRAALQWPRLRVEQRPALPGLGPAVQINEAFTVSVTDGRTASQLAELTAADAFVVDVALNYADTAYLVAAHNRHASAANKALFLRLLHTAIPQVEFIKDSPALIVARVLSSLINESVIMVESGVCSREDIDVAAVAGVNYADGIFGWLDSLGEKNVRTTLSNLAQLLHAARYAPHYTLLHAAQPALTTTP

SEQ ID NO: 43 - protein, 509 aa, Serratia marcescens SM39
MAESNAAIQSAAIIGAGTMGRGIAYLFAQKGIRTVLYNRNGNTLNQAREYIVQDLNKKVEQGKIALQDKGAVLANLVFTSVFETIADSELVIETIAEQEQTKLEVLAAIAAAVKPDTLIATNTSSLSLNKLATAVTHSERFIGLHFFNPAPLMKLIEIIPAYFTARATTERCRQLVAALGKRDVVCQATPGFIVNRMARPYYLEGFRLLEEHVARAPQIDRALKAGGHFRMGPLELTDFIGQDINYQVSRQIWQDMQYDPRYTPGHLQRSLVDAGLLGKKNGRSYFAAEENALPVTAATDADVETLRIYGEHPFFTLLQQRAALQWPRLRVEQRPALPGLGPAVQINEAFTVSVTDGRTASQLAELTAADAFVVDVALNYADTAYLVAAHNRHASAANKALFLRLLHTAIPQVEFIKDSPALIVARVLSSLINESVIMVESGVCSREDIDVAAVAGVNYADGIFGWLDNLGEKNVRTTLSNLAQLLHAARYAPHYTLLHAAQPALTTTP

SEQ ID NO: 44 - protein, 509 aa, Serratia marcescens 189
MAESNAAIQSAAIIGAGTMGRGIAYLFAQKGIRTVLYNRNGNTLNQAREYIAQDLNKKVEQGKIALQDKGAVLANLVFTSVFETIADSDLVIETIAEQEQTKLEVLAAIAAAVKPDTLIATNTSSLSLNKLATAVTHSERFIGLHFFNPAPLMKLIEIIPAYFTARATTERCRQLVAALGKRDVVCQATPGFIVNRMARPYYLEGFRLLEEHVARAPQIDRALKAGGHFRMGPLELTDFIGQDINYQVSRQIWQDMQYDPRYTPGHLQRSLVDAGLLGKKNGRSYFAAEENALPVTAATDADVETLRIYGEHPFFTLLQQRAALQWPRLRVEQRPALPGLGPAVQINEAFTVSVTDGRTASQLAELTAADAFVVDVALNYADTAYLVAAHNRHASAANKALFLRLLHTAIPQVEFIKDSPALIVARVLSSLINESVIMVESGVCSREDIDVAAVAGVNYADGIFGWLDNLGEKNVRTTLSNLAQLLHAARYAPHYTLLHAAQPALTTTP

SEQ ID NO: 45 - protein, 509 aa, Serratia marcescens SMB2099
MAESNAAIQSAAIIGAGTMGRGIAYLFAQKGIRTVLYNRNGNTLNQAREYIAQDLNKKVEQGKIALQDKGAVLANLVFTSVFETIADSDLVIETIAEQEQTKLEVLAAIAAAVKPDTLIATNTSSLSLNKLATAVTHSERFIGLHFFNPAPLMKLIEIIPAYFTARATTERCRQLVAALGKRDVVCQATPGFIVNRMARPYYLEGFRLLEEHVARAPQIDRALKAGGHFRMGPLELTDFIGQDINYQVSRQIWQDMQYDPRYTPGHLQRSLVDAGLLGKKNGRSYFAAEENALPVTAATDADVETLRVYGEHPFFTLLQQRAALQWPRLRVEQRPALPGLGPAVQINEAFTVSVTDGRTASQLAELTAADAFVVDVALNYADTAYLVAAHNRHASEANKALFLRLLHTAIPQVEFIKDSPALIVARVLSSLINESVIMVESGVCSREDIDVAAVAGVNYADGIFGWLDSLGEKNVRTTLSNLAQLLHAARYAPHYTLLHAAQPALTTTP

SEQ ID NO: 46 - protein, 509 aa, Serratia marcescens 2880STDY5682862
MAESNAAIQSAAIIGAGTMGRGIAYLFAQKGIRTVLYNRNGNTLNQAREYIVQDLNKKVEQGKIALQDKGAVLANLVFTSVFETIADSELVIETIAEQEQTKLEVLAAIAAAVKPDTLIATNTSSLSLNKLATAVTHSERFIGLHFFNPAPLMKLIEIIPAYFTARATTERCRQLVAALGKRDVVCQATPGFIVNRMARPYYLEGFRLLEEHVARAPQIDRALKAGGHFRMGPLELTDFIGQDINYQVSRQIWQDMQYDPRYTPGHLQRSLVDAGLLGKKNGRSYFAAEENALPVTAATDADVETLRVYGEHPFFTLLQQRAALQWPRLRVEQRPALPGLGPAVQINEAFTVSVTDGRTASQLAELTAADAFVVDVALNYADTAYLVAAHNRHASAANKALFLRLLHTAIPQVEFIKDSPALIVARVLSSLINESVIMVESGVCSREDIDVAAVAGVNYADGIFGWLDSLGEKNVRTTLSNMAQLLHAARYAPHYTLLHAAQPALMTTP

SEQ ID NO: 47 - protein, 509 aa, Serratia marcescens SE4145
MAESNAEIQSAAIIGAGTMGRGIAYLFAQKGIRTVLYNRNGNTLNQAREYIVQDLNKKVEQGKIALQDKGAVLANLVFTSVFETIADSELVIETIAEQEQTKLEVLAAIAAAVKPDTLIATNTSSLSLNKLATAVTHSERFIGLHFFNPAPLMKLIEIIPAYFTARATTERCRQLVAALGKRDVVCQATPGFIVNRMARPYYLEGFRLLEEHVARAPQIDRALKAGGHFRMGPLELTDFIGQDINYQVSRQIWQDMQYDPRYTPGHLQRSLVDAGLLGKKNGRSYFAAEENALPVTAATDADVETLRIYGEHPFFTLLQQRAALQWPRLRVEQRPALPGLGPAVQINEAFTVSVTDGRTASQLAELTAADAFVVDVALNYADTAYLVAAHNRHASAANKALFLRLLHTAIPQVEFIKDSPALIVARVLSSLINESVIMVESGVCSREDIDVAAVAGVNYADGIFGWLDNLGEKNVRTTLSNLAQLLHAARYAPHYTLLHAAQPALTTTP

SEQ ID NO: 48 - protein, 509 aa, Serratia marcescens 2880STDY5682876
MAESNAAIQSAAIIGAGTMGRGIAYLFAQKGIRTVLYNRNGNTLNQAREYIAQDLNKKVEQGKIALQGKGAVLANLVFTSVFETIADSDLVIETIAEQEQTKLEVLAAIAAAVKPDTLIATNTSSLSLNKLATAVTHSERFIGLHFFNPAPLMKLIEIIPAYFTARATTERCRQLVAALGKRDVVCQATPGFIVNRMARPYYLEGFRLLEEHVARAPQIDRALKAGGHFRMGPLELTDFIGQDINYQVSRQIWQDMQYDPRYTPGHLQRSLVDAGLLGKKNGRSYFAAEENALPVTAATDADVETLRVYGEHPFFTLLQQRAALQWPRLRVEQRPALPGLGPAVQINEAFTVSVTDGRTASQLAELTAADAFVVDVALNYADTAYLVAAHNRHASAANKALFLRLLHTAIPQVEFIKDSPALIVARVLSSLINESVIMVESGVCSREDIDVAAVAGVNYADGIFGWLDSLGEKNVRTTLSNLAQLLHAARYAPHYTLLHAAQPALTTTP

SEQ ID NO: 49 - protein, 509 aa, Serratia marcescens 709
MAESNAAIQSAAIIGAGTMGRGIAYLFAQKGIRTVLYNRNGNTLNQAREYIAQDLNKKVEQGKIALQDKGAVLANLVFTSVFETIADSDLVIETIAEQEQTKLEVLAAIAAAVKPDTLIATNTSSLSLNKLATAVTHSERFIGLHFFNPAPLMKLIEIIPAYFTARATTERCRQLVAALGKRDVVCQATPGFIVNRMARPYYLEGFRLLEEHVARAPQIDRALKAGGHFRMGPLELTDFIGQDINYQVSRQIWQDMQYDPRYTPGHLQRSLVDAGLLGKKNGRSYFAAEENALPVTAATDADVETLRVYDEHPFFTLLQQRAALQWPRLRVEQRPALPGLGPAVQINEAFTVSVTDGRTASQLAELTAADAFVVDVALNYADTAYLVAAHNRHASAANKALFLRLLHTAIPQVEFIKDSPALIVARVLSSLINESVIMVESGVCSREDIDVAAVAGVNYADGIFGWLDSLGEKNVRTTLSNLAQLLHAARYAPHYTLLHAAQPALTTTP

SEQ ID NO: 50 - protein, 509 aa, Serratia marcescens MGH136
MAESNAAIQSAAIIGAGTMGRGIAYLFAQKGIRTVLYNRNGNTLNQAREYIAQDLNKKVEQDKIALQDKGAVLANLVFTSVFETIADSDLVIETIAEQEQTKLEVLAAIAAAVKPDTLIATNTSSLSLNKLATAVTHSERFIGLHFFNPAPLMKLIEIIPAYFTARVTTERCRQLVAALGKRDVVCQATPGFIVNRMARPYYLEGFRLLEEHVARAPQIDRALKAGGHFRMGPLELTDFIGQDINYQVSRQIWQDMQYDPRYTPGHLQRSLVDAGLLGKKNGRSYFAAEENALPVTAATDADVETLRVYGEHPFFTLLQQRAALQWPRLRVEQRPALPGLGPAVQINEAFTVSVTDGRTASQLAELTAADAFVVDVALNYADTAYLVAAHNRHASAANKALFLRLLHTAIPQVEFIKDSPALIVARVLSSLINESVIMVESGVCSREDIDVAAVAGVNYADGIFGWLDSLGEKNVRTTLSNLAQLLHAARYAPHYTLLHAAQPALTTTP

SEQ ID NO: 51 - protein, 509 aa, Serratia marcescens 2880STDY5682884
MAESNAAIQSAAIIGAGTMGRGIAYLFAQKGIRTVLYNRNGNTLNQAREYIAQDLNKKVEQGKIALQDKGAVLANLVFTSVFETIADSELVIETIAEQEQTKLEVLAAIAAAVKPDTLIATNTSSLSLNKLATAVTHSERFIGLHFFNPAPLMKLIEIIPAYFTARATTERCRQLVAALGKRDVVCQATPGFIVNRMARPYYLEGFRLLEEHVARAPQIDRALKAGGHFRMGPLELTDFIGQDINYQVSRQIWQDMQYDPRYTPGHLQRSLVDAGLLGKKNGRSYFAAEENALPVTAATDADVETLRIYGEHPFFTLLQQRATLQWPRLRVEQRPALPGLGPAVQINEAFTVSVTDGRTASQLAELMAADAFVVDVALNYADTAYLVAAHNRHASAANKALFLRLLHTAIPQVEFIKDSPALIVARVLSSLINESVIMVESGVCSREDIDVAAVAGVNYADGIFGWLDSLGEKNVRMTLSNLAQLLHAARYAPHYTLLHAAQPALTTTP

SEQ ID NO: 52 - protein, 509 aa, Serratia marcescens D-3
MAESNAAIQSAAIIGAGTMGRGIAYLFAQKGIRTVLYNRNGNTLNQAREYIAQDLNKKVEQGKIALQDKGAVLANLVFTSVFETIADSDLVIETIAEQEQTKLEVLAAIAAAVKPDTLIATNTSSLSLNKLATAVTHSERFIGLHFFNPAPLMKLIEIIPAYFTARATTERCRQLVAALGKRDVVCQATPGFIVNRMARPYYLEGFRLLEEHVARAPQIDRALKAGGHFRMGPLELTDFIGQDINYQVSRQIWQDMQYDPRYTPGHLQRSLVDAGLLGKKNGRSYFAAEENALPVTAAIDADVETLRVYGEHPFFTLLQQRAALQWPRLRVEQRPALPGLGPAVQINEAFTVSVTDGRTASQLAELTAADAFVVDVALNYADTAYLVAAHNRHASAANKALFLRLLHTAIPQVEFIKDSPALIVARVLSSLINESVIMVESGVCSREDIDVAAVAGVNYADGIFGLLDSLGEKNVRTTLSNLAQLLHAARYAPHYTLLHAAQPALTTTP

SEQ ID NO: 53 - protein, 509 aa, Serratia marcescens 2880STDY5682957
MAESNAAIQSAAIIGAGTMGRGIAYLFAQKGIRTVLYNRNGNTLNQAREYIELDLNKKVEQGKIALQDKGAVLANLVFTSAFETIADSELVIETIAEQEQTKLEVLAAIAAAVKPDTLIATNTSSLSLNKLATAVTHSERFIGLHFFNPAPLMKLIEIIPAYFTARATTERCRQLVAALGKRDVVCQATPGFIVNRMARPYYLEGFRLLEEHVARAPQIDRALKAGGHFRMGPLELTDFIGQDINYQVSRQIWQDMQYDPRYTPGHLQRSLVDAGLLGKKNGRSYFAAEENALPVTAATDADVETLRVYGEHPFFTLLQQRAALQWPRLRVEQRPALPGLGPAVQINEAFTVSVTDGRTASQLAELTAADAFVVDVALNYADTAYLVAAHNRHASAANKALFLRLLHTAIPQVEFIKDSPALIVARVLSSLINESVIMVESGVCSREDIDVAAVAGVNYADGIFGWLDSLGEKNVRTTLSNLAQLLHAARYAPHYTLLHAAQPALTTTP

SEQ ID NO: 54 - protein, 509 aa, Serratia marcescens YDC563
MAESNAAIQSAAIIGAGTMGRGIAYLFAQKGIRTVLYNRNGNTLNQAREYIELDLNKKVEQGKIALQDKGAVLANLVFTSAFETIADSELVIETIAEQEQTKLEVLAAIAAAVKPDTLIATNTSSLSLNKLATAVTHSERFIGLHFFNPAPLMKLIEIIPAYFTARATTERCRQLVAALGKRDVVCQATPGFIVNRMARPYYLEGFRLLEEHVARAPQIDRALKAGGHFRMGPLELTDFIGQDINYQVSRQIWQDMQYDPRYTPGHLQRSLVDAGLLGKKNGRSYFAAEENALPVTAATDADVETLRVYGEHPFFTLLQQRAALQWPRLRVEQRPALPGLGPAVQINEAFTVSVTDGRTASQLAEQTAADAFVVDVALNYADTAYLVAAHNRHASAANKALFLRLLHTAIPQVEFIKDSPALIVARVLSSLINESVIMVESGVCSREDIDVAAVAGVNYADGIFGWLDSLGEKNVRTTLSNMAQLLHAARYAPHYTLLHAAQPALMTTP

SEQ ID NO: 55 - protein, 509 aa, Serratia marcescens 2880STDY5683035
MAESNAAIQSAAIIGAGTMGRGIAYLFAQKGIRTVLYNRNGNTLNQAREYIAQDLNKKVEQGKIALQDKGAVLANLVFTSVFETIADSDLVIETIAEQEQTKLEVLAAIAAAVKPDTLIATNTSSLSLNKLATAVTHSERFIGLHFFNPAPLMKLIEIIPAYFTARATTERCRQLVAALGKRDVVCQATPGFIVNRMARPYYLEGFRLLEEHVARAPQIDRALKAGGHFRMGPLELTDFIGQDINYQVSRQIWQDMQYDPRYTPGHLQRSLVDAGLLGKKNGRSYFAAEENALPVTAAIDADVETLRVYGEHPFFTLLQQRAALQWPRLRVEQRPALPGLGPAVQINEAFTVSVTDGRTASQLAELTAADVFVVDVALNYADTAYLVAAHNRHASAANKALFLRLLHTAIPQVEFIKDSPALIVARVLSSLINESVIMVESGVCSREDIDVAAVAGVNYADGIFGLLDSLGEKNVRTTLSNLAQLLHAARYAPHYTLLHAAQPALTTTP

SEQ ID NO: 56 - protein, 509 aa, Serratia marcescens 2880STDY5682930
MAESNAAIQSAAIIGAGTMGRGIAYLFAQKGIRTVLYNRNGNTLNQAREYIAQDLNKKVEQGKIALQDKGAVLANLVFTSVFETIADSDLVIETIAEQEQTKLEVLAAIAAAVKPDTLIATNTSSLSLNKLATAVTHSERFIGLHFFNPAPLMKLIEIIPAYFTARATTERCRQLVAALGKRDVVCQATPGFIVNRMARPYYLEGFRLLEEHVARAPQIDRALKAGGHFRMGPLELTDFIGQDINYQVSRQIWQDMQYDPRYTPGHLQRSLVDAGLLGKKNGRSYFAAEENALPVTAATDADVETLRVYGEHPFFTLLQQRAALQWPRLRVEQRPALPGLGPAVQINEAFTVSVTDGRTASQLAELTAADAFVVDVALNYADTAYLVAAHNRHASAANKALFLRLLHTAIPQVEFIKDSPALIVARVLSSLINESVIMVESGVCSREDINVAAVAGVNYADGIFGLLDSLGEKNVRTTLSNLAQLLHAARYAPHYTLLHAAQPVLTTTP

SEQ ID NO: 57 - protein, 509 aa, Serratia marcescens 790
MAESNAAIQSAAIIGAGTMGRGIAYLFAQKGIRTVLYNRNGNTLNQAREYIAQDLNKKVEQGKIALRDKGAVLANLVFTSVFETIADSELVIETIAEQEQTKLEVLAAIAAAVKPDTLIATNTSSLSLNKLATAVTHSERFIGLHFFNPAPLMKLIEIIPAYFTARATTERCRQLVAALGKRDVVCQATPGFIVNRMARPYYLEGFRLLEEHVARAPQIDRALKAGGHFRMGPLELTDFIGQDINYQVSRQIWQDMQYDPRYTPGHLQRSLVDAGLLGKKNGRSYFAAEENALPVTAATDADVETLRVYGEHPFFTLLQQRAALQWPRLRVEQRPALPGLGPAVQTNEAFTVSVTDGRTANQLAELTAADAFVVDVALNYADTAYLVAAHNRHASAANKALFLRLLHTAIPQVEFIKDSPALIVARVLSSLINESVIMVESGVCSREDIDVAAVAGVNYADGIFGWLDSLGEKNVRTTLSNMAQLLHAARYAPHYTLLHAAQPALMTTP

SEQ ID NO: 58 - protein, 509 aa, Serratia marcescens UMH5
MAESNAAIQSAAIIGAGTMGRGIAYLFAQKGIRTVLYNRNGNTLSQARDYIELDLNKKVEQGKIALQDKGAVLANLVFTSVFETIADSELVIETIAEQEQTKLEVLATIAAAVKPDTLIATNTSSLSLNKLATAVTHSERFIGLHFFNPAPLMKLIEIIPAYCTAHATTERCRQLVAALGKRDVVCQATPGFIVNRMARPYYLEGFRLLEEHVARAPQIDRALKAGGHFRMGPLELTDFIGQDINYQVSRQIWQDMQYDARYTPGHLQRSLVDAGLLGKKNGRSYFAVEENAPPVMAATDADIETLHVYGEHPFFTLLQQRAALQWPRLRVEQRQALPGLGPAVRINDAFTISITDGRTANQLAEQTAADAFVVDVALNYADTAYLVAAHSRHASGANKALFLRLLHTAIPQVEFIKDSPALIVARVLSSLINESVIMVESGVCSREDIDVAAVAGVNYADGIFGWLDSLGEKNVRTTLSNLAQLLHAARYAPHYTLLHAAQPALTTTP

SEQ ID NO: 59 - protein, 509 aa, Serratia marcescens 2880STDY5682988
MAESNAAIQSAAIIGAGTMGRGIAYLFAQKGIRTVLYNRNGNTLSQARDYIELDLNKKVEQGKIALQDKGAVLANLVFTSVFETIADSELVIETIAEQEQTKLEVLATIAAAVKPDTLIATNTSSLSLNKLATAVTHSERFIGLHFFNPAPLMKLIEIIPAYCTAHATTERCRQLVAALGKRDVVCQATPGFIVNRMARPYYLEGFRLLEEHVARAPQIDRALKAGGHFRMGPLELTDFIGQDINYQVSRQIWQDMQYDARYTPGHLQRSLVDAGLLGKKNGRSYFAVEENAPPVMAATDADIETLHVYGEHPFFTLLQQRAALQWPRLRVEQRQALPGLGPAVRINDAFTISITDGRTANQLAEQTATDAFVVDVALNYADTAYLVAAHSRHASGANKALFLRLLHTAIPQVEFIKDSPALIVARVLSSLINESVIMVESGVCSREDIDVAAVAGVNYADGIFGWLDSLGEKNVRTTLSNLAQLLHAARYAPHYTLLHAAQPALTTTP

SEQ ID NO: 60 - protein, 509 aa, Serratia marcescens 945154301
MAESNAAIQSAAIIGAGTMGRGIAYLFAQKGIRTVLYNRNGNTLNQARDYIELDLNKKVEQGKIALQDKGAVLANLVFTSVFETIADSELVIETIAEQEQTKLEVLAAIAAAVKPDTLIATNTSSLSLNKLATAVTHSERFIGLHFFNPAPLMKLIEIIPAYFTAHATTERCRQLVAALGKRDVVCQATPGFIVNRMARPYYLEGFRLLEEHVARAPQIDRALKAGGHFRMGPLELTDFIGQDINYQVSRQIWQDMQYDARYTPGHLQRSLVDAGLLGKKNGRSYFAAEENAPPVMAATDADIETLHVYGEHPFFTLLQQRAALQWPQLRVEQRPALPGLGPAVRINDAFSVSITDGRTANQLAEQTAADAFVVDVALNYADTAYLVAAHSRHASAANKALFLRLLHTAIPQVEFIKDSPALIVARVLSSLINESVIMVESGVCSREDIDVAAVAGVNYADGIFGWLDSLGEKNVRTTLSNLAQLLHAARYAPHYTLLHAAQPALTTTP

SEQ ID NO: 61 - protein, 509 aa, Serratia marcescens at10508
MAESNAAIQSAAIIGAGTMGRGIAYLFAQKGIRTVLYNRNGNTLNQARDYIELDLNKKVEQGKIALQDKGAVLANLVFTSVFETIADSELVIETIAEQEQTKLEVLAAIAAAVKPDTLIATNTSSLSLNKLATAVTHSERFIGLHFFNPAPLMKLIEIIPAYFTAHATTERCRQLVTALGKRDVVCQATPGFIVNRMARPYYLEGFRLLEEHVARAPQIDRALKAGGHFRMGPLELTDFIGQDINYQVSRQIWQDMQYDARYTPGHLQRSLVDAGLLGKKNGRSYFAVEENAPPVMAATDADIETLHVYGEHPFFTLLQQRAALQWPQLRVEQRPALPGLGPAVRINDAFTVSITDGRTANQLAEQTAADAFVVDVALNYADTAYLVAAHSRHASAANKALFLRLLHTAIPQVEFIKDSPALIVARVLSSLINESVIMVESGVCSREDIDVAAVAGVNYADGIFGWLDSLGEKNVRTTLSNLAQLLHAARYAPHYTLLHAAQPALTTTP

SEQ ID NO: 62 - protein, 509 aa, Serratia marcescens ML2637
MAESNAAIQSAAIIGAGTMGRGIAYLFAQKGIRTVLYNRNGNTLNQARDYIELDLNKKVEQGKIALQDKGAVLANLVFTSVFETIADSELVIETIAEQEQTKLEVLAAIAAAVKPDTLIATNTSSLSLNKLATAVTHSERFIGLHFFNPAPLMKLIEIIPAYFTAHATTERCRQLVTALGKRDVVCQATPGFIVNRMARPYYLEGFRLLEEHVARAPQIDRALKAGGHFRMGPLELTDFIGQDINYQVSRQIWQDMQYDARYTPGHLQRSLVDAGLLGKKNGRSYFAVEENAPPVMAATDADIETLHVYGEHPFFTLLQQRAALQWPQLRVEQRPALPGLGPAVRINDAFTVSITDGRTANQLAEQTAADAFVVDVALNYADTAYLVAAHSRHASAANKALFLRLLHTAIPQVEFIKDSPALIVARVLSSLINESVIMVESGVCSREDIDVAAVAGVNYADGIFGWLDSLGEKNVRTTLSNLAQLLHAARYAPHYTLLHAVQPALTTTP

SEQ ID NO: 63 - protein, 509 aa, Serratia marcescens SM1978
MAESNAAIQSAAIIGAGTMGRGIAYLFAQKGIRTVLYNRNGNTLNQARDYIELDLNKKVEQGKIALQDKGAVLANLVFTSVFETIADSELVIETIAEQEQTKLEVLAAIAAAVKPDTLIATNTSSLSLNKLATAVTHSERFIGLHFFNPAPLMKLIEIIPAYFTAHATTERCRQLVTALGKRDVVCQATPGFIVNRMARPYYLEGFRLLEEHVARAPQIDRALKAGGHFRMGPLELTDFIGQDINYQVSRQIWQDMQYDARYTPGHLQRSLVDAGLLGKKNGRSYFAAEENAPPVMASTDADIETLHVYGEHPFFTLLQQRAALQWPQLRVEQRPALPGLGPAVRINDAFSVSITDGRTANQLAEQTTADAFVVDVALNYADTAYLVAAHSRHASAANKALFLRLLHTAIPQVEFIKDSPALIVARVLSSLINESVIMVESGVCSREDIDVAAVAGVNYADGIFGWLDSLGEKNVRTTLSNLAQLLHAARYAPHYTLLHAAQPALTTTP

SEQ ID NO: 64 - protein, 509 aa, Serratia marcescens PWN146
MAESNAAIQSAAIIGAGTMGRGIAYLFAQKGIRTVLYNRNGNTLNQARDYIELDLNKKVEQGKIALQDKGAVLANLVFTSVFETIADSELVIETIAEQEQTKLEVLATIAAAVKPDTLIATNTSSLSLNKLATAVTHSERFIGLHFFNPAPLMKLIEIIPAYFTAHATTERCRQLVAALGKRDVVCQATPGFIVNRMARPYYLEGFRLLEEHVARAPQIDRALKAGGHFRMGPLELTDFIGQDINYQVSRQIWQDMQYDARYTPGHLQRSLVDAGLLGKKNGRSYFAVEENAPPVMAATDADIETLHVCGEHPFFTLLQQRAALQWPRLRVEQRPALPGLGPAVWINDAFTVSITDGRTANQLAEQTAADAFVVDVALNYADTAYLVAAHSRHASAANKALFLRLLHTAIPQVEFIKDSPALIVARVLSSLINESVIMVESGVCSREDIDVAAVAGVNYADGIFGWLDSLGEKNVRATLSNLAQLLHAARYAPHYTLLHAAQPALTTTP

SEQ ID NO: 65 - protein, 509 aa, Serratia marcescens H1q
MAERNAAIQSAAIIGAGTMGRGIAYLFAQKGIRTVLYNRNGNTLIQAREYIVQDLDKKVEQGRLAPQDKDAVLANLQFSSVFEAIVDSDLVLETIAEQEQAKLEVLAAIAAAVKPDTLIATNTSSLSLNKLATAVTHSERFIGLHFFNPAPLMKLIEIIPAYFTAQATTETCRQLVAALGKRDVVCQATPGFIVNRMARPYYLEGFRLLEEHVARAPQIDRALKAGGHFRMGPLELTDFIGQDINYQVSRQIWQDMQYDPRYTPGHLQRSLVDAGLLGKKNGRSYFSAEETAPPVEAAVEADVETLRIYGEHPLFTLLQQRAALQWPQLRVEQRPALSGLGAAIQVNDAFTVSITDGRTANQLAEQTAADAFVVDVALNYADTAYLVAAHSRHASAANKALFLRLLHTALPQVEFIKDSPALIVARVLSSLINESVIMVESGVCSREDIDVAAVAGVNYADGIFGWLTRLGEKNVRTTLSNLAQLLHAARYAPHYTLLHAAQPALTTTP

SEQ ID NO: 66 - protein, 509 aa, Serratia marcescens UMH6
MAESNAAIQSAAIIGAGTMGRGIAYLFAQKSIRTVLYNRNGNTLNQARDAIVQDLNKKVEQGKLALQDKDAVLANLTFSAEFGAIADSDLVIETIAEHEQAKLEVLAAIAATVKPDTLIATNTSSLSLNKLATAVTHSERFIGLHFFNPAPLMKLIEIIPAYFTAQVTTERCRQLVAALGKRDVVCQATPGFIVNRMARPYYLEGFRLLEEHVARAPQIDRALKAGGHFRMGPLELTDFIGQDINYQVSRQIWQDMQYDPRYTPGHLQRSLVDAGLLGKKNGRSYFSAEESPPPLAAAVDAEVETLRIYGEHPLFTLLQQRAALQWPRLRVEQRPTLPGLGAAIQVNDAFTVSVTDGRTANQLAEQTAADAFVVDVALNYGDTAYLVAAHSRHASAANKALFLRLLHTAIPQVEFIKDSPALIVARVLSSLINESVIMVESGVCSREDIDVAAVAGVNYADGIFGWLTRLGEENVRTTLSNLAQLLHAARYAPHYTLLHAAQPALTTTP

SEQ ID NO: 67 - protein, 509 aa, Serratia nematodiphila WCU338
MAESNAAIQSAAIIGAGTMGRGIAYLFAQKSIRTVLYNRNGNTLNQARDAIVQDLNKKVEQGKLALQDKDAVLANLTFSAEFGAIADSDLVIETIAEHEQAKLEVLAAIAATVKPDTLIATNTSSLSLNKLATAVTHSERFIGLHFFNPAPLMKLIEIIPAYFTAQITTERCRQLVAALGKRDVVCQATPGFIVNRMARPYYLEGFRLLEEHVARAPQIDRALKAGGHFRMGPLELTDFIGQDINYQVSRQIWQDMQYDPRYTPGHLQRSLVDAGLLGKKNGRSYFSAEESPPPLAAAVDAEVETLRIYGEHPLFTLLQQRAALQWPRLRVEQRPTLPGLGAAIQVNDAFTVSVTDGRTANQLAEQTAADAFVVDVALNYGDTAYLVAAHSRHASAANKALFLRLLHTAIPQVEFIKDSPALIVARVLSSLINESVIMVESGVCSREDIDVAAVAGVNYADGIFGWLTRLGEENVRTTLSNLAQLLHAARYAPHYTLLHAAQPALTTTP

SEQ ID NO: 68 - protein, 509 aa, Serratia sp. OLEL1
MAESNAAIQSAAIIGAGTMGRGIAYLLAQKSIRTVLYNRNGNTLNQARDAIVQDLNKKVEQGKLALQDKDAVLANLTFSAEFGAIADSDLVIETIAEHEQAKLEVLAAIAATVKPDTLIATNTSSLSLNKLATAVTHSERFIGLHFFNPAPLMKLIEIIPAYFTAQVTTERCRQLVAALGKRDVVCQATPGFIVNRMARPYYLEGFRLLEEHVARAPQIDRALKAGGHFRMGPLELTDFIGQDINYQVSRQIWQDMQYDPRYTPGHLQRSLVDAGLLGKKNGRSYFSAEESPPPLAAAVDAEVETLRIYGEHPLFTLLQQRAALQWPRLRVEQRPTLPGLGAAIQVNDAFTVSVTDGRTANQLAEQTAADAFVVDVALNYGDTAYLVAAHSRHASAANKALFLRLLHTAIPQVEFIKDSPALIVARVLSSLINESVIMVESGVCSREDIDVAAVAGVNYADGIFGWLTRLGEENVRTTLSNLAQLLHAARYAPHYTLLHAAQPALTTTP

SEQ ID NO: 69 - protein, 509 aa, Serratia marcescens 7209
MAESNAAIQSAAIIGAGTMGRGIAYLFAQKSIRTVLYNRNGNTLNQARDAIVQDLNKKVEQGKLALQDKDAVLANLTFSAEFGVIADSDLVIETIAEHEQAKLEVLAAIAATVKPDTLIATNTSSLSLNKLATAVTHSERFIGLHFFNPAPLMKLIEIIPAYFTAQVTTERCRQLVAALGKRDVVCQATPGFIVNRMARPYYLEGFRLLEEHVARAPQIDRALKAGGHFRMGPLELTDFIGQDINYQVSRQIWQDMQYDPRYTPGHLQRSLVDAGLLGKKNGRSYFSAEESPPPLAAAVDAEVETLRIYGEHPLFTLLQQRAALQWPRLRVEQRPTLPGLGAAIQVNDAFTVSVTDGRTANQLAEQTAADAFVVDVALNYGDTAYLVAAHSRHASAANKALFLRLLHTAIPQVEFIKDSPALIVARVLSSLINESVIMVESGVCSREDIDVAAVAGVNYADGIFGWLTRLGEENVRTTLSNLAQLLHAARYAPHYTLLHAAQPALTTTP

SEQ ID NO: 70 - protein, 509 aa, Serratia marcescens sicaria (Ss1)
MAESNAAIQSAAIIGAGTMGRGIAYLFAQKSIRTVLYNRNGNTLNQARDAIVQDLNKKVEQGKLALQDKDAVLANLTFSAEFGAIADSDLVIETIAEHEQAKLEVLAAIAATVKPDTLIATNTSSLSLNKLATAVTHSERFIGLHFFNPAPLMKLIEIIPAYFTAQVTTERCRQLVAALGKRDVVCQATPGFIVNRMARPYYLEGFRLLEEHVARAPQIDRALKAGGHFRMGPLELTDFIGQDINYQVSRQIWQDMQYDPRYTPGHLQRSLVDAGLLGKKNGRSYFSTEESPPPLAAAVDAEVETLRIYGEHPLFTLLQQRAALQWPRLRVEQRPTLPGLGAAIQVNDAFTVSVTDGRTANQLAEQTAADAFVVDVALNYGDTAYLVAAHSRHASAANKALFLRLLHTAIPQVEFIKDSPALIVARVLSSLINESVIMVESGVCSREDIDVAAVAGVNYADGIFGWLTRLGEENVRTTLSNLAQLLHAARYAPHYTLLHAAQPALTTTP

SEQ ID NO: 71 - protein, 509 aa, Serratia sp. OLFL2
MAESNAAIQSAAIIGAGTMGRGIAYLLAQKSIRTVLYNRNGNTLNQARDAIVQDLNKKVEQGKLALQDKDAVLANLTFSAEFGAIADSDLVIETIAEHEQAKLDVLAAIAATVKPDTLIATNTSSLSLNKLATAVTHSERFIGLHFFNPAPLMKLIEIIPAYFTAQVTTERCRQLVAALGKRDVVCQATPGFIVNRMARPYYLEGFRLLEEHVARAPQIDRALKAGGHFRMGPLELTDFIGQDINYQVSRQIWQDMQYDPRYTPGHLQRSLVDAGLLGKKNGRSYFSAEESPPPLAAAVDAEVETLRIYGEHPLFTLLQQRAALQWPRLRVEQRPTLPGLGAAIQVNDAFTVSVTDGRTANQLAEQTAADAFVVDVALNYGDTAYLVAAHSRHASAANKALFLRLLHTAIPQVEFIKDSPALIVARVLSSLINESVIMVESGVCSREDIDVAAVAGVNYADGIFGWLTRLGEENVRTTLSNLAQLLHAARYAPHYTLLHAAQPALTTTP

SEQ ID NO: 72 - protein, 509 aa, Serratia marcescens BIDMC 81
MAESNAAIQSAAIIGAGTMGRGIAYLLAQKSIRTVLYNRNGNTLNQARDAIVQDLNKKVEQGKLALQDKDAVLANLTFSAEFGAIADSDLVIETIAEHEQAKLEVLAAIAATVKPDTLIATNTSSLSLNKLATAVTHSERFIGLHFFNPAPLMKLIEIIPAYFTAQVTTERCRQLVAALGKRDVVCQATPGFIVNRMARPYYLEGFRLLEEHVARAPQIDRALKAGGHFRMGPLELTDFIGQDINYQVSRQIWQDMQYDPRYTPGHLQRSLVDAGLLGKKNGRSYFSAEESPPPLAAAVDAEVETLRIYGEHPLFTLLQQRAALQWPRLRVEQRPTLPDLGAAIQVNDAFTVSVTDGRTANQLAEQTAADAFVVDVALNYGDTAYLVAAHSRHASAANKALFLRLLHTAIPQVEFIKDSPALIVARVLSSLINESVIMVESGVCSREDIDVAAVAGVNYADGIFGWLTRLGEENVRTTLSNLAQLLHAARYAPHYTLLHAAQPALTTTP

SEQ ID NO: 73 - protein, 509 aa, Serratia marcescens BIDMC 50
MAESNAAIQSAAIIGAGTMGRGIAYLFAQKSIRTVLYNRNGNTLNQARDAIVQDLNKKVEQGKLALQDKDVVLANLTFSAEFGAIADSDLVIETIAEHEQAKLEVLAAIAATVKPDTLIATNTSSLSLNKLATAVTHSERFIGLHFFNPAPLMKLIEIIPAYFTAQVTTERCRQLVAALGKRDVVCQATPGFIVNRMARPYYLEGFRLLEEHVARAPQIDRALKAGGHFRMGPLELTDFIGQDINYQVSRQIWQDMQYDPRYTPGHLQRSLVDAGLLGKKNGRSYFSAEESPPPLAAAVDAEVETLRIYGEHPLFTLLQQRAALQWPRLRVEQRPTLPDLGAAIQVNDAFTVSVTDGRTANQLAEQTAADAFVVDVALNYGDTAYLVAAHSRHASAANKALFLRLLHTAIPQVEFIKDSPALIVARVLSSLINESVIMVESGVCSREDIDVAAVAGVNYADGIFGWLTRLGEENVRTTLSNLAQLLHAARYAPHYTLLHAAQPALTTTP

SEQ ID NO: 74 - protein, 509 aa, Serratia marcescens UMH7
MAESNAAIQSAAIIGAGTMGRGIAYLLAQKSIRTVLYNRNGNTLNQARDAIVQDLNKKVEQGKLALQDKDTVLANLTFSAEFGAIADSDLVIETIAEHEQAKLEVLAAIAATVKPDTLIATNTSSLSLNKLATAVTHSERFIGLHFFNPAPLMKLIEIIPAYFTAQVTTERCRQLVAALGKRDVVCQATPGFIVNRMARPYYLEGFRLLEEHVARAPQIDRALKAGGHFRMGPLELTDFIGQDINYQVSRQIWQDMQYDPRYTPGHLQRSLVDAGLLGKKNGRSYFSAEESPPPLAAAVDAEVETLRIYGEHPLFTLLQQRATLQWPRLRVEQRPTLPGLGAAIQVNDAFTVSVTDGRTANQLAEQTAADAFVVDVALNYGDTAYLVAAHSRHASAANKALFLRLLHTAIPQVEFIKDSPALIVARVLSSLINESVIMVESGVCSREDIDVAAVAGVNYADGIFGWLTRLGEENVRTTLSNLAQLLHAARYAPHYTLLHAAQPALTTTP

SEQ ID NO: 75 - protein, 509 aa, Serratia marcescens RSC-14
MAESNAAIQSAAIIGAGTMGRGIAYLLAQKSIRTVLYNRNGNTLNQARDAIVQDLNKKVEQGKLALQDKDAVLANLTFSTEFGAIADSDLVIETIAEHEQAKLEVLAAIAATVKPDRLIATNTSSLSLNKLATAVTHSERFIGLHFFNPAPLMKLIEIIPAYFTAQVTTERCRQLVAALGKRDVVCQATPGFIVNRMARPYYLEGFRLLEEHVARAPQIDRALKAGGHFRMGPLELTDFIGQDINYQVSRQIWQDMQYDPRYTPGHLQRSLVDAGLLGKKNGRSYFSAEESPPPLAAAVDAEVETLRIYGEHPLFTLLQQRAALQWPRLRVEQQPTLPGLGAAIQVNDAFTVSVTDGRTANQLAEQTAADAFVVDVALNYGDTAYLVAAHSRHASAANKALFLRLLHTAIPQVEFIKDSPALIVARVLSSLINESVIMVESGVCSREDIDVAAVAGVNYADGIFGWLTRLGEENVRTTLSNLAQLLHAARYAPHYTLLHAAQPALTTTP

SEQ ID NO: 76 - protein, 509 aa, Serratia marcescens SM03
MAERNAAIQSAAIIGAGTMGRGIAYLFAQKGIRTVLYNRNGNTLIQAREYIVQDLDKKVEQGRLAPQDKDAVLANLQFSSVFEAIVDSDLVLETIAEQEQAKLEVLAAIAAAVKPDTLIATNTSSLSLNKLATAVTHSERFIGLHFFNPAPLMKLIEIIPAYFTAQATTETCRQLVAALGKRDVVCQATPGFIVNRMARPYYLEGFRLLEEHVARAPQIDRALKAGGHFRMGPLELTDFIGQDINYQVSRQIWQDMQYDPRYTPGHLQRSLVDAGLLGKKNGRSYFSAEETAPPVEAAAEADVETLRIYGEHPLFTLLQQRAALQWPQLRVEQRPALSGLGAAIQVNDAFTVSVTDGRTANQLAEQTAADAFVVDVALNYADTAYLVAAHSRHASAANKALFLRLLHTALPQVEFIKDSPALIVARVLSSLINESVIMVESGVCSREDIDVAAVAGVNYADGIFGWLTRLGEKNVRTTLSNLAQLLHAARYAPHYTLLHAAQPALTTTP

SEQ ID NO: 77 - protein, 509 aa, Serratia marcescens 90-166
MAESNAAIQSAAIIGAGTMGRGIAYLFAQKGIRTVLYNRNGNTLIQAREYIVQDLDKKIEQGRVAPQDKDAVLANLTFSAEFGAIVDSDLVIETIAEHEQAKLEVLAAIAATVKPDTLIATNTSSLSLNKLATAVTHSERFIGLHFFNPAPLMKLIEIIPAYFTAQVTTERCRQLVAALGKRDVVCQATPGFIVNRMARPYYLEGFRLLEEHVARAPQIDRALKAGGHFRMGPLELTDFIGQDINYQVSRQIWQDMQYDPRYTPGHLQRSLVDAGLLGKKNGRSYFSAEESPPPLAAAVDAEIETLRIYGEHPLFTLLQQRAALQWPRLRVEHRPTLPGLGAAIQVNDAFTVSVTDGRTANQLAEQTAADAFVVDVALNYGDTAYLAAAHSRHASAANKALFLRLLHTAIPQVEFIKDSPALIVARVLSSLINESVIMVESGVCSREDIDVAAVAGVNYADGIFVWLTRLGEENVRTTLSNLAQLLHAARYAPHYTLLHAAQPALTSTP

SEQ ID NO: 78 - protein, 509 aa, Serratia marcescens UMH2
MAESNAAIQSAAIIGAGTMGRGIAYLLAQKSIRTVLYNRNGNTLNQARDAIVQDLNKKVEQGKLALQDKDAVLANLTFSTEFGAIADSDLVIETIAEHEQAKLEVLAAIAATVKPDTLIATNTSSLSLNKLATAVTHSERFIGLHFFNPAPLMKLIEIIPAYFTAQVTTERCRQLVAALGKRDVVCQATPGFIVNRMARPYYLEGFRLLEEHVARAPQIDRALKAGGHFRMGPLELTDFIGQDINYQVSRQIWQDMQYDPRYTPGHLQRSLVDAGLLGKKNGRSYFSAEESPPPLAAAVDAEVEALRIYGEHPLFTLLQQRAALQWPRLRVEQRPTLPGLGAAIQVNDAFTVSVTDGRTANQLAEQTAADAFVVDVALNYGDTAYLVAAHSRHASAANKALFLRLLHTAIPQVEFIKDSPALIVARVLSSLINESVIMVESGVCSREDIDVAAVAGVNYADGIFGWLTHLGEENVRTTLSNLAQLLHAARYAPHYTLLHAAQPALTTTP

SEQ ID NO: 79 - protein, 509 aa, Serratia plymuthica AS9
MAENNSAIRSAAVIGAGTMGRGIAYLLALNGIRTVLYNRNGNNLNQARDYIVSDLDRKMDNGKITLQKKGQILANIIFSAVFDAITDSDLVIETIAEDEQTKHEILAAIAATVKPEAIIATNTSSLSLNKLAAGVENNPRFIGLHFFNPAPLMKLIEIIPSYFTSHTTSLRCQQLVIALGKQFVVCKATPGFIVNRMARPFYLEGFRLLEENVAQAPQIDRALKAGGHFRMGPLELTDFIGQDINYQVSKQIWQDMQFDSRYTPGHLQRSLVDAGLLGRKNGRSFFASLPATPPTPATESDTPTSLHFYGEHALFDHLQQRALATWPALRVQRLPERPELGRLILVNNTLAIKITDGRTANLLAGLTALDTFVIDAALNYADTAYLVAAHNQHATEANKALFLSLLQTVIAQVEFIKDSPALIVARVLSSLINESVIMVESGVCSRADIDIAAVAGVNYADGIFAWLAQLGQKNVKSTLDNMAQLLHSARYYPHYSLLNAARPELAVAP

SEQ ID NO: 80 - protein, 509 aa, Serratia plymuthica tumat 205
MAENNSAIRSAAVIGAGTMGRGIAYLLALNGIRTVLYNRNGNNLNQARDYIVSDLDRKIDNGKITLQKKGQILANIIFSAVFDAITDSDLVIETIAEDEQTKHEILAAIAATVKPEAIIATNTSSLSLNKLAAGVENNPRFIGLHFFNPAPLMKLIEIIPSYFTSHATSLRCQQLVIALGKQFVVCKATPGFIVNRMARPFYLEGFRLLEENVALAPQIDRALKAGGHFRMGPLELTDFIGQDINYQVSKQIWQDMQFDPRYTPGHLQRSLVDAGLLGRKNGRSFFASQPVTPPTPTTESDTPTSLHFYGEHALFDHLQQRALATWPALRVQRLPERPELGRFILVNNAMAIKITDGRTANLLAGLTALDTFVIDAALNYADTAYLVAAHNQHATETNKALFLTLLQTVIAQVEFIKDSPALIVARVLSSLINESVIMVESGVCSRADIDIAAVAGVNYADGIFAWLAQLGQKNVKSTLDNMAQLLHSARYYPHYSLLNAARPELAVAP

SEQ ID NO: 81 - protein, 509 aa, Serratia plymuthica A30
MAENNSAIRSAAVIGAGTMGRGIAYLLALNGIRTVLYNRNGNNLNQARDYIVSDLDRKIDNGKITLQKKGQILANIIFSAVFDAITDSDLVIETIAEDEQTKHEILAAIAATVKPEAIIATNTSSLSLNKLAAGVENNPRFIGLHFFNPAPLMKLIEIIPSYFTSHATSLRCQKLVIALGKQFVVCKATPGFIVNRMARPFYLEGFRLLEENVALAPQIDRALKAGGHFRMGPLELTDFIGQDINYQVSKQIWQDMQFDPRYTPGHLQRSLVDAGLLGRKNGRSFFASQPATPPNPTTEGDTPTSLHFYGEHALFDHLQQRALATWPALRVQRLPERPELGRFILMNNRLAIKITDGRTANLLAGLTALDTFVIDAALNYADTAYLVAAHNQHATETNKALFLTLLQTLIAQVEFIKDSPALIVARVLSSLINESVIMVESGVCSRADIDIAAVAGVNYADGIFAWLAQLGQKNVKSTLDNMAQLLHSARYYPHYSLLNAARPELAVAP

SEQ ID NO: 82 - protein, 509 aa, Serratia plymuthica 4Rx13
MAENNSAIRSAAVIGAGTMGRGIAYLLALNGIRTVLYNRNGNSLNQARDYIVSDLDRKIDNGKITLQKKGQILANIIFSAVFDAITDSDLVIETIAEDEQTKHEILAAIAATVKPEAIIATNTSSLSLNKLAAGVENNPRFIGLHFFNPAPLMKLIEIIPSYFTSHATSLRCQKLVIALGKQFVVCKATPGFIVNRMARPFYLEGFRLLEENVALAPQIDRALKAGGHFRMGPLELTDFIGQDINYQVSKQIWQDMQFDPRYTPGHLQRSLVDAGLLGRKNGRSFFASQPATPPTPTTESDTPTSLHFYGEHALFDHLQQRALATWPALSVQRLPERPELGRFILVNNALAIKITDGRTANLLAGLTALDTFVIDAALNYADTAYLVAAHNQHATETNKALFLTLLQTVIAQVEFIKDSPALIVARVLSSLINESVIMVESGVCSRADIDIAAVAGVNYADGIFAWLAQLGQKNVKSTLDNMAQLLHSARYYPHYSLLNAARPELAVAP

SEQ ID NO: 83 - protein, 509 aa, Serratia plymuthica V4
MAENNSAIRSAAVIGAGTMGRGIAYLLALNGIRTVLYNRNGNNLNQARDYIVSDLDRKIDNGKITLQKKGQILANIIFSAVFDAITDSDLVIETIAEDEQTKHEILAAIAATVKPEAIIATNTSSLSLNKLAAGVENNPRFIGLHFFNPAPLMKLIEIIPSYFTSHATSLRCQKLVIALGKQFVVCKATPGFIVNRMARPFYLEGFRLLEENVALAPQIDRALKAGGHFRMGPLELTDFIGQDINYQVSKQIWQDMQFDPRYTPGHLQRSLVDAGLLGRKNGRSFFASQPATPPTPTTESDTPTSLHFYGEHALFDHLQQRALATWPALRVQRLPERPELGRFILVNNRLAIKITDGRTANLLAGLTALDTFVIDAALNYADTAYLVAAHNQHATETNKALFLTLLQTVIAQVEFIKDSPALIVARVLSSLINESVIMVESGVCSRADIDIAAVAGVNYADGIFAWLAQLGQKNVKSTLDNMAQLLHSARYYPHYSLLNAARPELAVAP

SEQ ID NO: 84 - protein, 509 aa, Serratia plymuthica 3Rp8
MAENNSAIRSAAVIGAGTMGRGIAYLLALNGIRTVLYNRNGNNLNQARDYIVSDLDRKIDNGKITLQKKGQILANIIFSAVFDAITDSDLVIETIAEDEQTKHEILAAIAATVKPEAIIATNTSSLSLNKLAAGVENNPRFIGLHFFNPAPLMKLIEIIPSYFTSHATSLRCQKLVIALGKQFVVCKATPGFIVNRMARPFYLEGFRLLEENVALAPQIDRALKAGGHFRMGPLELTDFIGQDINYQVSKQIWQDMQFDPRYTPGHLQRSLVDAGLLGRKNGRSFFASQPATPPTPTTESDTPTSLHFYGEHALFDHLQQRALATWPALRVQRLPERPELGRFILVNNRLAIKITDGRTANLLAGLTALDTFVIDAALNYADTAYLVAAHNQHATETNKALFLTLLQTLIAQVEFIKDSPALIVARVLSSLINESVIMVESGVCSRADIDIAAVAGVNYADGIFAWLAQLGQKNVKSTLDNMAQLLHSARYYPHYSLLNAARPELAVAP

SEQ ID NO: 85 - protein, 509 aa, Serratia proteamaculans MFPA44A14
MAENNSAIHSVAVIGAGTMGRGIAYLLAQNGIRTLLYNRSGNNLDQARDYIIRDLDKKIDNGKISPQKKGEVLANLVFSPIFDAIADSDLVIETIAEHETTKHEILAAIAATVKQEAIIATNTSSLSLNKLAAGVENNARFIGLHFFNPAPLMKLIEIIPSYFTSRATSLRCQQLVTALGKQFVVCKATPGFIVNRMARPFYLEGFRLLEENVALAPQIDRALKAGGHFRMGPLELTDFIGQDINYQVSSQIWQDMQYDPRYTPGHLQRSLVDAGLLGKKNGRSFFAAPSAESNLLDAGNGTLTSLHFYGEHTLFDLLQQRALATWPTLQIIHQPERPTLGRFIRVNDALAVKITDGRTANLLAELTDLDTFVIDAALNYSDTTYLVAAHNQDAAEANKALFLSLLQTLIPQVEFIKDSPGLIVARVLSSLINESVIMVESGVCSRADIDIAAVAGVNYADGIFAWLTQLGQKNVKSTLDNMAQLLHSARYYPHYSLLNIPRPELAVAP

SEQ ID NO: 86 - protein, 509 aa, Serratia plymuthica A153
MAENNSAIRSAAVIGAGTMGRGIAYLLALNGIRTVLYNRNGNNLNQARDYIVSDLDRKIDNGKITLQKKGQILANIIFSDVFDAITDSDLVIETIAEDEQTKHEILAAIAATVKPEAIIATNTSSLSLNKLAAGVENNPRFIGLHFFNPAPLMKLIEIIPSYFTSRATSLRCQQLVTALGKLFVVCKATPGFIVNRMARPFYLEGFRLLEENVALAPQIDRALKAGGHFRMGPLELTDFIGQDINYQVSKQIWQDMQFDPRYTPGHLQRSLVDAGLLGRKNGRSFFASQPATPPNPTTEGHTPTSLLFYGEHALFDHLQQRALATWPALRVQRLPERPELGRFILVNNRLAIKITDGRTANLLAGLTALDTFVIDAALNYADTAYLVAAHNQHATEPNKALFLTLLQTLIAQVEFIKDSPALIVARVLSSLINESVIMVESGVCSRADIDIAAVAGVNYADGIFAWLAQLGQKNVKSTLDNMAQLLHSTRYYPHYSLLNAARPELAVAP

SEQ ID NO: 87 - DNA, 1530 bp, Serratia marcescens ATCC13880
atggcagaaagtaatgcggcaattcaatcggctgcgattatcggcgcgggaacgatgggcagaggcatcgcttatcttttcgcgcaaaaaggcattcgcacggtgctttataatcgcaacggcaataccctcaatcaggctcgcgaatatatcgcgcaagacctgaacaagaaagtcgaacagggcaagatcgcgctgcaggataaaggcgcggtgctggccaatctaatgttcacttcagtgtttgaggccatcgccgacagcgagctggtgatagaaaccatcgccgagcaagaacaaaccaaacttgaggtgctggcggccatcgccgcggtggtcaagcccgacacgctgatcgccaccaatacctcctcactgtcgcttaacaagctggctactgcggtgacgcacagcgaacgctttatcggtttgcattttttcaaccccgcgccgctgatgaagctgattgaaatcattccggcctactttaccgcgcacgccaccaccgaacgctgccgccaactggtggcggcgttggggaaacacgatgtcgtctgccaggccacgccggggttcatcgtcaatcgcatggcccgcccctactacctggaagggttccgcctgttggaagaacacgtggcgcgcgcggctcagatcgaccgcgccctcaaggccggcgggcgcttccgcatggggccgctcgagctgaccgattttatcggccaagacatcaactatcaggtcagtcggcaaatctggcaggatatgcaatacgacccgcgctatacccccggtcatctgcagcgttcactggtcgatgccggtctgttggggaaaaagaacggccgctcctattttgccgccgaagaaaccgccccgccggtgacggccgccagcaatgcagacgtcgagacgctgcgcgtttacggcgagcaccctttttttaccctgttacagcagcgagccgcgcttcagtggccacagctgcgcgtggaacaacggccggcattaccggggctggggtcggccgtccagatcaatgacgctttcaccgtcagcatcaccgatggccgcacggcgagccaactggccgagcagacggcagcggatgcctttgtggtcgatgtcgccctgaactacgccgacacgacgtatctggcggcggcgcacagccgccacgcctctgcggccaataaggcgctgtttttacgcctgctgcacacggcaatcccgcaggttgaatttatcaaggactctccggcgcttatcgtcgcccgcgtcctcagcagcctgatcaatgagtcggtgatcatggtggaaagcggcgtctgcagccgggaagacatcgatgtcgccgccgtcgcgggcgttaactacgccggcggcattttcgactggctcggcaaactgggggagaaaaacgtcaggacaacgctgagcaatctggctcagctgctgcacgcggcgcgctatgcgccgcattacacccttctgcacgccgcgcaaccggcgctgacgaccacgccttaa

SEQ ID NO: 88 - DNA, 1530 bp, Serratia nematodiphila DSM21420
atggcagaaagtaatgcggcaattcaatcggctgcgattatcggcgcgggaacgatgggcagaggcatcgcttatcttttcgcgcaaaaaggcattcccacgatgctttataatcgcaacggcaataccctcaatcaagctcgcgaatatatcgcgcaagacctgaataagaaagtcgaacagggcaagatcgcgctgcgggataaagacgcggtgctggccaatctgatgttcacttccgtgtttgaggccatcgccgacagcgagctggtgatagaaaccatcgccgagcaagaacaaaccaaacttgaggtgctggcggccatcgccgcagtggtcaagcccgacacgctgatcgccaccaatacctcctcactgtcgctcaacaagctggcaacggcggtaacgcacagcgaacgctttatcggtttgcattttttcaaccccgcgccgctgatgaagctgattgaaatcattccggcctactttaccgcgcacgccaccacggaacgctgccgccaactggtggcggcgttggggaaacgcgatgtcgtctgccaggccacgccggggttcatcgtcaatcgcatggcccgcccctactacctggaagggttccgcctgttggaagaacatgtggcgcgcgcggcgcagatcgaccgcgccctcaaagccggcgggcgcttccgcatggggccgctcgagctgaccgattttatcggccaagacatcaactatcaggtcagccggcaaatctggcaggacatgcaatacgacccgcgctatacccctggtcatctgcagcgttcactggtcgatgccggtctgttggggaaaaagaacggccgctcctattttgccgccgaagaaaccgccccgccggtgacggccgccaacaatgcagacgtcgagacgctgcgcgtttacggcgagcatcctttttttaccctgttgcagcagcgagccgcgcttcagtggccacagctgcgcgtggaacaacggccggcattaccggggctgggagcggccgtccagatcaatgacgctttcaccgtcagcatcaccgatggccgcacggcgagccaactggccgagcagacggcagcggatgcctttgtggtcgatctcgccctgaactacgccgacaccacgtatctggtggcggcgcacagccgccacgcttctgcggccaataaggcgctgtttttacgcctgctgcacacggcaatccctcaggttgaatttatcaaggactctccggcgcttatcgtcgcccgcgtcctcagcagcctgatcaatgagtcggtgatcatggtggaaagcggcgtctgcagccgggaagacatcgatgtcgccgccgtcgcgggcgttaactacgccggcggcattttcgactggctcggcaaactgggggagaaaaacgtcaggacgacgctgagcaatctggcgcagctgctgcacgcggcgcgctatgcgccgcattacacccttctgcacgccgcgcaaccggcgctgacgaccacgccttaa

SEQ ID NO: 89 - DNA, 1530 bp, Serratia plymuthica NBRC102599
atggcagagaataattcggcaatccgttcagccgccgttattggtgcggggaccatgggcagaggcatcgcctatctcctggcgctgaacggcatacgaaccgtactttataatcgcaatggtaataatctcaatcaggcccgtgactatattgtcagcgacctggacagaaaaatagataacggaaaaataaccctgcagaaaaaaggccagatattagccaatattattttctcggacgtctttgacgccataaccgacagcgatctggtgattgaaaccattgcggaagatgagcaaaccaagcatgaaatcctggcagccattgcggcgacggtaaaaccggaggcgatcattgcgaccaatacttcctctctgtcgctgaacaaactggcggcgggggtggaaaacaacccgcgctttatcggcctgcattttttcaatccggcgccgctgatgaagttgatcgaaattattccctcttatttcacctctcgcgccaccagtctacgctgccagcagttggtaacagcgttgggtaaacagtttgtggtctgcaaagccacgccgggctttattgttaaccgcatggcgcggcctttctatctggaagggttccggctgctggaggaaaacgtggcgctggcgccacagatcgaccgcgccctcaaggccggcgggcattttcgcatggggcctttagaactgactgattttatcggccaggatatcaactatcaggtcagcaagcagatttggcaggatatgcagttcgatccccgctatacccccggccatttgcaacgctcgctggtggatgccgggctgctggggaggaaaaacgggcgctctttttttgcttcccaacctgctacaccacccaacccaaccacagagggcgacacgccaacttcactgcatttttatggtgaacacgctttattcgatcacctgcaacagcgcgctttggccacctggcctgcgctgcgcgttcagcggttgccggaacggccggaactggggcgttttatcctggtgaataacaggctggcgatcaaaatcactgatggcagaacggcgaacctgctcgccggcttaaccgctctcgacaccttcgtgattgacgccgcgctgaactacgccgacaccgcctatctggtggccgcccacaatcaacatgccacagagacgaataaagcgctgtttctgacgctgctgcaaaccctcatcgctcaggtggagtttattaaagattcccctgccctgatcgttgcccgcgtactgagcagcctgatcaatgaatcggtgatcatggtggagagcggcgtttgcagccgggcagatatcgatatcgccgccgtggccggcgtgaactatgccgacggcatttttgcctggttggcgcagctcgggcagaaaaacgtgaaatcgacgctggataacatggcgcaattgctgcactccacgcgctattacccgcattactcattgctgaacgcggcccggcctgagctggctgtagcgccctaa

SEQ ID NO: 90 - DNA, 1530 bp, Serratia proteamaculans 568
atggcagagaataattcggcaatccattcggtcgctgttattggtgccgggaccatgggcagaggtattgcctatcttctggcgcaaaacggcatacgaaccctgctttataatcgtagcggtaataatctgaatcaggccagggactatattattcgtgacctggataagaaaatagatggcggaaaaataagcccgcagaaaaaaggcgagatattggccaatctggttttctctcccattttcgaggctattgccgacagcgatctggtgattgaaaccatcgcggaacatgaggcaaccaagcatgagatcctcgcggcgattgcggccacggtgaaaaaagaggcgattatcgccaccaatacctcctcgctgtcattgaataagctggccgcaggcgtcgaaaataacgcccggtttatcggcctgcacttcttcaatccggccccgctgatgaaactgatcgaaattattccgtcttactttaccagccgggccaccagcctgcgttgccagcagttggtgacggcgataggcaaacagtttgtggtctgcaaagccacgccgggctttatcgtcaaccggatggcgcgacctttttatctggaagggttccggctgttggaagagaacgtggcgctggcgccgcagatcgaccgcgcactcaaggccggtggccactttcgcatgggacctttagagctgaccgattttatcggccaggatattaactatcaggtcagcagccagatttggcaggacatgcagtacgatccccgctatacccccggccatttgcaacgttcgctggtggatgccgggctgctggggaagaaaaacggccgatccttttttaccccctcttccgccgaacccagctccgccgatgcaggtagcggcacgccgacctcactgaatttttatggtgaacatcccctgttcgacctgttgcaacagcgcgctttggcgctctggccaagggtgcagattaatcgccaatcggaacagccaacgctgggccgctttatccgggtgaatgacgcaatggccatcaaaatcaccgatggccgcaccgccaatctgctggctgaattgaccgaactcgataccttcgtgatcgacgccgcgctcaactacgccgataccgcctatctggcggctgcccacagccaggatgccagcgcggccaataaagcgctgtttctgacgctgctgcaaacgttgatcccgcaggtggagtttattaaagactccccgggcctgattgtcgcccgcgtcctgagcagcctgatcaatgagtcggtgattatggtggagagcggggtttgcagccgggcggacatcgatatcgccgcggtggccggcgttaactatgccgatggcatctttagctggctggcgcagcttgggcaaaaaaacgtgaagtcgacgctggacaatatggcgcaactgctgcattccgcccgctattacccgcattactctttgctcaataccccccggccagagctggccgtcgcgccctaa

SEQ ID NO: 91 - DNA, 1530 bp, Serratia ureilytica Lr5/4
atggcagaaagtaatgcggcaattcaatcggctgcgattatcggcgcgggaacgatgggcagaggcatcgcttatcttttggcgcaaaaaagcattcgtacggtgctttataatcgcaacggcaataccctcaatcaagctcgcgacgctatcgtgcaagacctgaacaaaaaggtggaacagggcaagctcgcgctgcaggacaaagacgcggtgctggctaatctgacgttctccgcggaatttggggccatcgccgacagcgatctggtgatcgaaaccatcgcagagcatgagcaagccaaactcgaggtgctggcggccatcgccgcgacggtcaagcccgacacgctgatcgccaccaatacctcctcactgtcgcttaataagctggcgacggcggtgacgcacagcgaacgctttatcggtttgcactttttcaaccccgcgccgctgatgaagctgattgaaatcattccggcctattttaccgcacaggtcaccaccgaacgttgccgtcaactggtggcggcgttggggaaacgcgatgtcgtctgtcaggccacgccgggatttatcgtcaaccgtatggcccgcccctactatctggaagggttccgcctgttggaagaacacgtggcgcgtgcgccgcagatcgaccgcgccctcaaagccggcggacactttcgcatggggccgctcgaactgaccgattttatcggtcaggacatcaactatcaggtcagccggcaaatttggcaggacatgcagtacgatccgcgctataccccgggccatctgcagcgctcgctggtcgatgccggtctgttgggcaaaaagaacggccgctcctatttttccgccgaagaatctcctccgccgcttgcggccgccgtcgatgcggaggtcgagacgctacgcatttacggtgaacatcctctctttactctgctacagcagcgggccaccctgcaatggccgcggctgcgcgtggaacaacggccgacattaccgggcctgggcgccgccattcaggttaatgacgctttcaccgtcagcgttaccgatggccgcacggcaaaccagcttgccgaacagaccgcggcggacgcctttgtcgtcgatgtcgccctgaactacggcgatacggcgtacctggtggcggcgcatagccgccacgcctctgcagccaataaggcgctgtttttacgcctgctgcacaccgcgatcccgcaggtggaatttatcaaggattccccggccttgatcgtcgcccgcgtgctcagcagcctgatcaacgagtcggtgatcatggtggaaagcggcgtctgcagccgggaagacattgatgtcgccgccgtcgccggcgtgaactacgccgacggtattttcggctggctcactcgcctcggggaggaaaatgtcaggacgacgctgagcaacctggcgcaattgctgcacgcggcgcgctatgcgccgcattacacccttctgcacgccgcccaaccggcgctgaccaccacgccttaa

SEQ ID NO: 92 - DNA, 1530 bp, Serratia sp. BW106
atggcagagaataattcggcaatccattcggtcgctgttattggtgccggaaccatgggcagaggtattgcctatcttctggcgcagaacggcatacgaaccctgctttataatcgtagcggtaataatctggatcaggcccgcgactatattatccgtgacctggataagaaaatagacaacgggaaaataagccaacagaaaaaaggcgaagtattggccaacctggttttctctcccattttcgacgctatcgccgacagcgacctggtgattgaaaccatcgcggagcatgagaccaccaagcatgaaatcctcgcggcgattgcggccacggtgaaacaagaggccattatcgccaccaacacctcatcgctgtcgttgaataagctggcggcaggcgtcgaaaacaacgcccgttttatcggcctgcacttcttcaatccggccccgctgatgaaactgatcgagattattccgtcctattttaccagccgggccaccagcctgcgctgccagcagttggtgacggcgctaggcaaacagtttgtggtctgcaaagccacgccgggttttatcgtcaaccggatggcacggcctttttatctggaaggattccggctgttggaagaaaacgtagcattggcaccgcagatcgaccgcgccctcaaggccggtggccactttcgcatgggccctttagagctgaccgactttatcggccaggatattaactatcaggtcagcagccagatttggcaggacatgcagtacgaccctcgctatacccccggccatttgcaacgttcgctggtggatgccgggttgttggggaagaaaaacggccgatccttttttgctgccccttcttccgaatcgaaccccctcgacgcaggcaacggcacgctgacttccctgcatttttatggcgaacataccctgtttgacctgctgcaacagcgcgccttggctatctggccaacgctgcagattattcaccagccggaacggccgacgctgggacgctttatccgggtgaatgacgcattggccgtcaaaatcaccgatggtcgcaccgccaatctgctcgctgaattgaccgatctcgacacctttgtgatcgacgccgcactgaattacagcgataccgcctatctggtggccgcccacaatcaggacgccgccgaggccaataaagcgctgtttctgtcgctgctgcaaacgttgatcccgcaggtggagtttattaaagactctccaggcctgatcgtcgcccgggttctgagcagtctgatcaatgagtcggtgatcatggtggagagcggggtttgcagccgggcagatatcgatattgccgccgtggcgggcgttaactatgccgatggcatctttgcctggctgacgcagctcgggcaaaaaaacgtgaaatcaacgctggataatatggcgcaactgctgcattccgcccgctattacccgcattactcattgctgaatgccccccggcccgaactggccgtcgcgccgtaa

SEQ ID NO: 93 - DNA, 1530 bp, Serratia liquefaciens FK01
atggcagagaataatacggcaatagattcggtcgccgtgattggcgccggaaccatgggcagaggcattgcctatcttttggcactgaacggcatacgaaccctgctttataatcgaaacggtaatcatcttaaccaggcccgggattatattgtcggcgacctggataaaaaaatcgacaacggaaaaataagccaacagaaaaagggcgaggtcctggccaatctggttttctcgccagttttcgacgccattgccgacagtgacctggtgattgaaaccatagcggaacatgaacccaccaagcatgagatcctcgcggccattgccgccacggtaaaaaaagaggcgattatcgccaccaatacctcttcgctgtcgctgaataaactggccgcagggatagaaaacaactcgcgctttatcggcctgcatttcttcaacccggcaccgctgatgaagctgatcgaaattatcccgtcctattttaccgcccgggccaccaccttacgctgccagcagttggtcacggcgataggcaaaaaatttgtggtctgcaaagccacgccgggctttatcgtcaatcgcatggcgcggcctttttatctggaaggttttcgcctgctggaggaaaacgtggcgctggcaccgcaaatcgaccgcgcgctcaaggccggaggccacttccgcatggggcctttggaactgactgattttattggtcaggacattaattatcaggtcagcagccagatttggcaggacatgcagtatgacccccgctatacccccggccatttgcaacgttcgctggtggatgccgggctgttggggaagaaaaacgggcgctcttttttttccccctcggctgacgccgccaacccaccggctaccggcggcggtacgctgagctcgctgcatttttttggcgaacatccgctgtttgatctgctgcaacagcacgccttcgcaacctgggcgcccctggcaataacacgtcagccggaacacccggttctgggccgttttatccaggtgaatgacagtctggcagtcaaaatcaccgacgggcgaacggccaatcagcttgccgagctggcgggtctcgataccttcgtggtcgacgttgcactgaactatgccaacaccgcttttctggtggcggcccacagccaacaggctaccgaggcgaataaagagctgttcctcacgctgctgcaaacggtgatcccgcaggtggagtttgttaaagattccccaggcctgatcgtcgcccgggttctgagcagcctgatcaatgagtcggtgatcatggtggagagcggggtttgtagccgagaagacatcgatatcgccgccgtggccggcgtcaactatgccgacggcatttttgcctggctggcgcagctcgggcagaaaaacgtgaaatcgacgctggataatatggcgcaactgctgcattccgcccgctattacccgcactactcgttgctccacgctaccaggcccgagctggccgtcgcgccatga

SEQ ID NO: 94 - DNA, 1530 bp, Serratia sp. S119
atggcagaaagtaatgcggcaattcaatcggctgcgattatcggcgcgggaacgatgggcagaggcatcgcttatcttttcgcgcaaaaaggcattcgcacggtgctttataatcgcaacggcaataccctcaatcaggctcgcgaatatatcgcgcaagacctgaacaagaaagtcgaacagggcaagatcgcgctgcaggataaaggcgcagtgctggctaatctggtgttcacctcggtgtttgagactatcgccgacagcgatctagtgatagaaaccatcgccgagcaagagcaaaccaaacttgaggtgctggcggccatcgccgcggcggtcaagcccgacacgctgatcgccaccaatacatcctcactgtcgcttaacaagctggcaaccgcggtgacacacagcgagcggtttatcggtttgcactttttcaatcccgcgccgctgatgaaactgattgaaatcatcccggcctactttaccgcacgcgccaccaccgaacgttgccgtcagctggtggccgcgttggggaaacgcgatgtcgtctgccaggccacgccggggtttatcgtcaaccgcatggcccgcccctactacctggaagggttccgcctgttggaagaacacgtggcgcgcgcgccgcagatcgaccgcgccctcaaggccggcgggcactttcgcatggggccgctcgagctgaccgattttatcggccaggacatcaactatcaggtcagccggcaaatctggcaggacatgcaatacgatccgcgctatacccccggccatctgcagcgttcgctggtcgatgccggtctgttggggaaaaagaacggccgctcctattttgccgccgaagaaaacgccttaccggtaacggccgccaccgatgcagacgtcgagacgctgcgcgtttacggcgaacaccctttttttaccctgttgcaacagcgggccgcgcttcagtggccacggctgcgcgtggagcaacggccggccttaccgggcctggggccggccgtccagatcaatgaggctttcaccgtcagcgtcaccgatggccgcacggcgagccagttggcggagctgacggcggcggatgcctttgtggtcgatgtcgccctgaactacgccgacacggcgtatctggtggcagcgcacaaccgccacgcctctgcggccaataaggcgctgtttttacgcctgctgcacacggcaatcccgcaggttgaatttatcaaggactccccggcgctgatcgtcgcccgcgtcctcagcagcctgatcaacgagtcggtgatcatggtggaaagcggcgtctgcagccgggaagacatcaatgtcgccgccgtcgccggcgttaactacgccgacggcattttcggcttgctcgatagcctgggggagaaaaacgtcaggacgacgctgagcaacctggcgcagctgctgcacgcggcacgctatgcgccgcattacacccttctacacgccgcgcaaccggcgctgacgaccacgccttaa

SEQ ID NO: 95 - DNA, 1530 bp, Serratia sp. YD25
atggcagaacgtaatgcggcaattcaatcggctgcgattatcggcgcgggaacgatgggcagaggcatcgcttatcttttcgcgcaaaaaggcattcgtacggtgctttataatcgcaacggcaataccctcattcaggctcgtgaatatatcgtgcaagacctggacaaaaaggtcgaacagggcaggctcgcgccgcaggataaagacgcggtgctggccaatctgcagttctcatcggtgtttgaagctatcgtcgacagcgatttggtgctcgaaactatcgccgagcaagagcaagccaaactcgaggtgctggccgccatcgctgcggcggtcaaacccgacacgctgatcgccaccaatacttcctcattgtcgctcaataagctggcaacggcggtgacccacagcgaacgctttatcggtttgcactttttcaatcccgcaccgctaatgaagctgattgaaatcattccggcctactttaccacccaagccaccactgaacgttgccgccaactggtggcggcattggggaaacgcgatgtcgtctgccaggctacgccggggttcatcgtcaaccgtatggcccgcccctactacctggaaggctttcgcctgttggaagagcacgtggcgcgcgcgccgcagatcgaccgcgccctcaaggccggcggacactttcgcatggggccgctcgagctgaccgattttatcggccaggacatcaactatcaggtcagccggcaaatttggcaggacatgcagtacgacccgcgctatacccccggccatctgcagcgttcgctggtcgatgccgggctgctggggaaaaagaacggtcgctcctatttttccgccgaagaaaccgccccgccggttgaggccgccgccgaggcggatgtcgagacgctgcgcatttacggcgaacaccctttgtttaccctgctgcaacagcgagccgcactgcaatggccgcagttgcgcgtggaacagcggccggccttgtcgggcctgggagcggccattcaggtcaatgacgctttcaccgtcagcgtcaccgatggccgcacggcaaatcagttggccgagcagacggcggcggacgcctttgtggtcgatgtcgccctgaactacgccgacacggcgtatctggtggcggcgcacagccgccacgcctctgcggctaataaggcgttgtttttgcgcctgctgcacaccgcgcttccgcaggttgaatttatcaaggactccccggcgctgatcgtcgcccgcgtcctcagcagcctgatcaacgagtcggtgatcatggtggaaagcggcgtctgcagccgggaagacatcgatgtcgccgccgtcgccggcgtgaactacgccgacggcattttcggctggctcactcgcctgggggagaaaaacgtcaggacgacgctgagcaacctggcgcagctgctgcacgcggcccgctatgcgccgcattacacccttctgcacgccgcccaaccggcgctgaccaccacgccttaa

SEQ ID NO: 96 - DNA, 1530 bp, Serratia sp. FS14
atggcagaaagtaatgcggcaattcaatcggctgcgattatcggcgcgggaacgatgggcagaggcatcgcttatcttttcgcgcaaaaaggcattcccacgatgctttataatcgcaacggcaataccctcaatcaagctcgcgaatatatcgcgcaagacctgaacaagaaagtcgaacagggcaagatcgcgttgcaggataaagacgcggtgctggccaatctgatgttcacttccgtgtttgaggccatcgccgacagcgagctggtgatagaaaccatcgccgagcaagaacaaaccaaacttgaggtgctggcggccatcgccgcggtggtcaagcccgacacgctgatcgccaccaatacctcctcactgtcgcttaacaagctggcaactgcggtgacgcacagcgagcgctttatcggtttacattttttcaaccccgctccgctgatgaagctgattgaaatcattccggcctactttaccgcgcacgccaccacggaacgctgccgccaactggtggcggcgttggggaaacgcgatgtcgtctgccaggccacgccggggttcatcgtcaatcgcatggcccgcccctactacctggaagggttccgcctgttggaagaacatgtggcgcgcgcggcgcagatcgaccgcgccctcaaggccggcgggcgcttccgcatggggccgctcgagctgaccgattttatcggccaagacattaactatcaggtcagccggcaaatctggcaggacatgcaatacgacccgcgctatacccctggtcatctgcagcgttcactggtcgatgccggtctgttggggaaaaagaacggccgctcctattttgccgccgaagaaaccgccccgccggtgacggccgccaacaatgcagacgtcgagacgctgcgcgtttacggcgagcatcctttttttaccctgttgcagcagcgagccgcgcttcagtggccacagctgcgcgtggaacaacggccggcattaccggggctgggagcggccgtccagatcaatgacgctttcaccgtcagcatcaccgatggccgcacggcgagccaactggccgagcagacggcagcggatgcctttgtggtcgatgtcgccctgaactacgccgacaccacgtacctggtggcggcgcacagtcgccacgcttctgcggccaataaggcgctgtttttacgcctgctgcacacggcaatcccacaggttgaatttatcaaggactctccggcgcttatcgtcgcccgcgtcctcagcagcctgatcaatgagtcggtgatcatggtggaaagcggcgtctgcagccgggaagacatcgatgtcgccgccgtcgcgggcgttaactacgccggcggcattttcgactggctcggcaaactgggggagaaaaacgtcaggacgacgctgagcaatctggcacagctgctgcacgcggcgcgctatgcgccgcattacacccttctgcacgccgcgcaaccggcgctgacgaccacgccttaa

SEQ ID NO: 97 - DNA, 1530 bp, Serratia sp. HMSC15F11
atggcagaaagtaatgcggcaattcagtcggctgcgattatcggcgcgggaacgatgggcagaggcatcgcttatcttttcgcgcaaaaaggcattcgcacggtgctttataatcgcaacggcaataccctcaatcaggctcgcgactatatcgagctagacctgaacaagaaagtcgaacagggtaagatcgcgctgcaggataaaggcgcggtgttggccaatctggtgttcacctcggtatttgagaccattgccgacagcgagctggtgatagaaaccatcgccgagcaagagcaaaccaaacttgaggtgctggcggccatcgccgcggcagtcaagcccgacacgctgatcgccaccaatacctcctcactgtcgctgaataagctggcaaccgcggtgacgcacagcgagcggtttatcggtttgcacttttttaaccccgcgccgctgatgaaactgattgaaatcatcccggcctactttaccgcacacgccaccacggagcgttgccgtcaactggtggccgcgttggggaaacgcgatgttgtctgccaggccacgccggggtttatcgtcaaccgcatggcccgcccctactacctggaagggttccgcctattggaagaacacgtggcgcgcgcgccgcagatcgaccgtgccctcaaggccggcgggcactttcgtatggggccgctcgagctgaccgattttatcggccaggacatcaactatcaggtcagtcggcaaatctggcaggacatgcaatacgacgcgcgctatacccccggccacctgcagcgttcgctggtcgatgccggtctattgggaaaaaagaacggccgctcctattttgccgtcgaagaaaacgccccgccggtgatggccgccaccgatgcagacattgagacgctgcacgtttacggcgaacaccctttttttaccctgttacaacaacgtgccgcgcttcagtggccacagctgcgcgtggaacaacggccggcattaccgggcctggggccggccgtccggatcaatgacgctttcaccgtcagcatcaccgatggccgcacggcaaaccagctggccgagcagacggcggcggatgcctttgtggtcgatgtcgccctgaattacgccgacacggcgtatctggtggcagcgcacagccgccacgcctctgcagccaataaagcgctgttcttacgcctgctgcacacggcaatcccgcaggttgaatttatcaaggattccccggcgctgatcgtcgcccgcgtcctcagcagcctaatcaacgagtcggtgatcatggtggaaagcggcgtctgcagccgggaagacatcgatgtcgccgccgtcgccggcgttaactacgccgacggcattttcggctggctagatagcctgggggagaaaaacgtcaggacgacgctgagcaacctggcgcagctgctgcacgcagcacgctatgcgccgcattacacccttctgcacgccgcgcaaccggcgctgacgaccacgccttaa

SEQ ID NO: 98 - DNA, 1530 bp, Serratia sp. JKS000199
atggcagaaagtaatgcggcaattcaatcggctgcgattatcggcgcgggaacgatgggcagaggcatcgcttatcttttggcgcaaaaaagcattcgtacggtgctttataatcgcaacggcaataccctcaatcaagctcgcgacgctatcgtgcaagacctgaacaaaaaggtggaacagggcaagctcgcgctgcaggacaaagacgcggtgctggctaatctgacgttctccacggaatttggggccatcgccgacagcgatctggtgatcgaaaccatcgcagagcatgagcaagccaaactcgaagtgctggcggccatcgccgcgacggtcaagcccgacacgctgatcgccaccaatacctcctcactgtcgcttaataagctggcgacggcggtgacgcacagcgaacgctttatcggtttgcactttttcaaccccgcgccgctgatgaagctgattgaaatcattccggcctattttaccgcacaggtcaccaccgaacgttgccgtcaactggtggcggcgttagggaaacgcgatgtcgtctgtcaggccacgccgggatttatcgtcaaccgtatggcccgcccctactatctggaagggttccgcctgttggaagaacacgtggcgcgtgcgccgcagatcgaccgcgccctcaaagccggcggacactttcgcatggggccgctcgagctgaccgattttatcggtcaggacatcaactatcaggtcagccggcaaatttggcaggacatgcagtacgatccgcgctataccccgggccatctgcagcgctcgctggtcgatgccggtctgttgggcaaaaagaacggccgctcctatttttccgccgaagaatctcccccgccgcttgcggccgccgtcgatgcggaagtcgagacgctacgcatttacggtgaacatcctctctttaccctgctacagcagcgggccgccctgcaatggccgcggctgcgcgtggaacaacggccgacattaccgggcctgggcgccgccattcaggtcaatgacgctttcaccgtcagcgttaccgatggccgcacggcaaaccagcttgccgaacagaccgcggcggacgcctttgtcgtcgatgtcgccctgaactacggcgatacggcgtacctggtggcggcgcatagccgccacgcctctgcggccaataaggcgctgtttttgcgcctgctgcacaccgcgatcccgctggtggaatttatcaaggattccccggccttgatcgtcgcccgcgtgctcagcagcctgatcaacgagtcggtgatcatggtggaaagcggcgtctgcagccgggaagacattgatgtcgccgccgtcgccggcgtgaactacgccgacggtattttcggctggctcactcgcctcggggaggaaaatgtcaggacgacgctgagcaacctggcgcaattgctgcacgcggcgcgctatgcgccgcattacacccttctgcacgccgcccaaccggcgctgaccaccacgccttaa

SEQ ID NO: 99 - DNA, 1530 bp, Serratia sp. TEL
atggcagaaagtaatgcggcaattcaatcggctgcgattatcggcgcgggaacgatgggcagaggcatcgcttatcttttggcgcaaaaaagcattcgtacggtgctttataatcgcaacggcaataccctcaatcaagctcgcgacgctatcgtgcaagacctgaacaaaaaggtggaacagggcaagctcgcgctgcaggacaaagacgcggtgctggctaatctgacgttctccgcggaatttggggccatcgccgacagcgatctggtgatcgaaaccatcgcagagcatgagcaagccaaactcgaggtgctggcggccatcgccgcgacggtcaagcccgacacgctgatcgccaccaatacctcctcactgtcgcttaataagctggcgacggcggtgacgcacagcgaacgctttatcggtttgcactttttcaaccccgcgccgctgatgaagctgattgaaatcattccggcctattttaccgcacaggtcaccaccgaacgttgccgtcaactggtggcggcgttggggaaacgcgatgtcgtctgtcaggccacgccgggatttatcgtcaaccgtatggcccgcccctactatctggaagggttccgcctgttggaagaacacgtggcgcgtgcgccgcagatcgaccgcgccctcaaagccggcggacactttcgcatggggccgctcgaactgaccgattttatcggtcaggacatcaactatcaggtcagccggcaaatttggcaggacatgcagtacgatccgcgctataccccgggccatctgcagcgctcgctggtcgatgccggtctgttgggcaaaaagaacggccgctcctatttttccgccgaagaatctcctccgccgcttgcggccgccgtcgatgcggaggtcgagacgctacgcatttacggtgaacatcctctctttactctgctacagcagcgggccaccctgcaatggccgcggctgcgcgtggaacaacggccgacattaccgggcctgggcgccgccattcaggttaatgacgctttcaccgtcagcgttaccgatggccgcacggcaaaccagcttgccgaacagaccgcggcggacgcctttgtcgtcgatgtcgccctgaactacggcgatacggcgtacctggtggcggcgcatagccgccacgcctctgcagccaataaggcgctgtttttacgcctgctgcacaccgcgatcccgcaggtggaatttatcaaggattccccggccttgatcgtcgcccgcgtgctcagcagcctgatcaacgagtcggtgatcatggtggaaagcggcgtctgcagccgggaagacattgatgtcgccgccgtcgccggcgtgaactacgccgacggtattttcggctggctcactcgcctcggggaggaaaatgtcagggcgacgctgagcaacctggcgcaattgctgcacgcggcgcgctatgcgccgcattacacccttctgcacgccgcccaaccggcgctgaccaccacgccttaa

SEQ ID NO: 100 - DNA, 1530 bp, Serratia sp. ISTD04
atggcagaaagtaatgcggcaattcaatcggctgcgattatcggcgcgggaacgatgggcagaggcatcgcttatcttttggcgcaaaaaagcattcgtacggtgctttataatcgcaacggcaataccctcaatcaagctcgcgacgctatcgtgcaagacctgaacaaaaaggtggaacagggcaagctcgcgctgcaggacaaagacgcggtgctggctaatctgacgttctccgcagaatttggggtcatcgccgacagcgatctggtgatcgaaaccatcgcagaacatgagcaagccaaactcgaggtgctggcggccatcgccgcgacggtcaagtccgacacgctgatcgccaccaatacctcctcactgtcgcttaataagctggcgacggcggtgacgcacagcgaacgctttatcggtttgcactttttcaaccccgcgccgctgatgaagctgattgaaatcattccggcctattttaccgcacaggtcaccaccgaacgttgccgtcaactggtggcggcgttagggaaacgcgatgtcgtctgtcaggccacgccgggatttatcgtcaaccgtatggcccgcccctactatctggaagggttccgcctgttggaagaacacgtggcgcgtgcgccgcagatcgaccgcgccctcaaagccggcggacactttcgcatggggccgctcgagctgaccgattttatcggtcaggacatcaactatcaggtcagccggcaaatttggcaggacatgcagtacgatccgcgctataccccgggccatctgcagcgctcgctggtcgatgccggtctgttgggcaaaaagaacggccgctcctatttttccgccgaagaatctcccccgccgcttgcggccgccgtcgatgcggaagtcgagacgctacgcatttacggtgaacatcctctctttactctgctacagcagcgggccgccctgcaatggccgcggctgcgcgtggaacaacggccgacattaccgggcctgggcgccgccattcaggtcaatgacgctttcaccgtcagcgttaccgatggccgcacggcaaaccagcttgccgaacagaccgcggcggacgcctttgtcgtcgatgtcgccctgaactacggcgatacggcgtacctggtggcggcacatagccgccatgcctctgcggccaataaggcgctgtttttacgcctgctgcacaccgcgatcccgcaggtggaatttatcaaggattccccggccttgatcgtcgcccgcgtgctcagcagcctgatcaacgagtcggtgatcatggtggaaagcggcgtctgcagccgggaagacattgatgtcgccgccgtcgccggcgtgaactacgccgacggtattttcggctggctcactcgcctcggggaggaaaatgtcaggacgacgctgagcaacctggcgcaattgctgcacgcggcgcgctatgcgccgcattacacccttctgcacgccgcccaaccggcgctgaccaccacgccttaa

SEQ ID NO: 101 - DNA, 1530 bp, Serratia sp. SCBI
atggcagaaagtaatgcggcaattcaatcggctgcgattatcggcgcgggaacgatgggcagaggcatcgcttatcttttggcgcaaaaaagcattcgtacggtgctttataatcgcaacggcaataccctcaatcaagctcgcgacgctatcgtgcaagacctgaacaaaaaggtggaacagggcaagctcgcgctgcaggacaaagacgcggtgctggctaatctgacgttctccgcggaatttggggccatcgccgacagcgatctggtgatcgaaaccatcgcagagcatgagcaagccaaactcgaggtgctggcggccatcgccgcgacggtcaagcccgacacgctgatcgccaccaatacctcctcactgtcgcttaataagctggcgacggcggtgacgcacagcgaacgctttatcggtttgcactttttcaaccccgcgccgctgatgaagctgattgaaatcattccggcctattttaccgcacaggttaccaccgaacgttgccgtcaactggtggcggcgttggggaaacgcgatgtcgtctgtcaggccacgccgggatttatcgtcaaccgtatggcccgcccctactatctggaagggttccgcctgttggaagaacacgtggcgcgtgcgccgcagatcgaccgcgccctcaaagccggcggacactttcgcatggggccgctcgagctgaccgattttatcggtcaggacatcaactatcaggtcagccggcaaatttggcaggacatgcagtacgatccgcgctataccccgggccatctgcagcgctcgctggtcgatgccggtctgttgggcaaaaagaacggccgctcctatttttccaccgaagaatctcccccgccgcttgcggccgccgtcgatgcggaggtcgagacgctacgcatttacggtgaacatcctctctttaccctgctacagcagcgggccgccctgcaatggccgcggctgcgcgtggaacaacggccgacattaccgggcctgggcgccgccattcaggtcaatgacgctttcaccgtcagcgttaccgatggccgcacggcaaaccagcttgccgaacagaccgcggcggacgcctttgtcgtcgatgtcgccctgaactacggcgatacggcgtacctggtggcggcgcatagccgccacgcctctgcggccaataaggcgctgtttttacgcctgctgcacaccgcgatcccgcaggtggaatttatcaaggattccccggccttgatcgtcgcccgcgtgctcagcagcctgatcaacgagtcggtgatcatggtggaaagcggcgtctgcagccgggaagacattgatgtcgccgccgtcgccggcgtgaactacgccgacggcattttcggctggctcactcgcctcggggaggaaaatgtcaggacgacgctgagcaacctggcgcaattgctgcacgcggcgcgctatgcgccgcattacacccttctgcacgccgcccaaccggcgctgaccaccacgccttaa

SEQ ID NO: 102 - DNA, 1530 bp, Serratia sp. S4
atggcagagaataattcggcaatccattcggtcgctgttattggtgccgggaccatgggcagaggtattgcctatcttctggcgcaaaacggcatacgaaccctgctttataatcgtagcggtaataatctgaatcaggccagggactatattatccgtgacctggataagaaaatagatggcggtaaaataagcctgcagaagaaaggcgagatattggccaatctggttttctctcctattttcgaggctattgccgacagcgacctggtgattgaaaccatcgcggaacatgagtcaaccaagcatgagatcctctcggcgattgcggccacggtgaaaaaagaggcgattatcgccaccaatacctcatcgctgtcattgaataagctggcggcaggcgtcgaaaataacgcccgttttatcggcctgcacttcttcaatccggccccgctgatgaaactgatcgaaattattccgtcttactttaccagccgggccaccagcctgcgttgccagcagttggtgacggtgataggcaaacagtttgtggtctgcaaagccacgccgggctttatcgtcaaccggatggcgcgacctttttatctggaagggtttcggctgttggaagagaacgtggcgctggcgccgcagatcgaccgcgcactcaaggccggtggccacttccgcatgggacctttagagctgaccgattttatcggccaggatattaactatcaggtcagcagccagatttggcaggacatgcagtacgacccccgctatacccccggtcatttgcaacgttcgctggtggatgccgggctgctggggaagaaaaacggccgatccttttttaccccctcttccgccacacccagctccgccgacgcaggcagcggcacgccgacctcactgaatttttatggtgaacatcccctgttcgacctgttgcaacagcgcgctttggcgctctggccaaggttgcagattaatcgccaatcggaacagccaacgctgggccgctttatccgggtgaatgacgcaatggccatcaaaattaccgatggccgcaccgccaatctgctggctgaattgaccgaactcgataccttcgtgatcgacgccgcgctcaactacgccgataccgcctatctggcggctgcccacagccaggatgccagcacggccaataaagcgctgtttctgacgctgctgcaaacgttgatcccacaggtggagtttattaaagactccccgggcctgattgtcgcccgcgtcctgagcagcctgatcaatgagtcggtgattatggtggagagcggggtttgcagccgggcggacatcgatatcgccgcggtggccggcgttaactatgccgatggcatctttagctggctggcgcagcttgggcaaaaaaacgtgaagtcgacgctggacaatatggctcaactgctgcattccgcccgctattacccgcattactctttgctcaataccccccggccagagctggccgtcgcgccctaa

SEQ ID NO: 103 - DNA, 1530 bp, Serratia sp. C-1
atggcagagaataattcggcaatccgttcagccgccgttattggtgcggggaccatgggcagaggcatcgcctacctcctggcactgaacggcatacgaaccgtactttataatcgcaatggtaataatctcaatcaggcccgtgactatattgtcagcgacctggacagaaaaatagataacggaaaaataaccctgcagaaaaaaggccagatattagccaatattattttctcggccgtctttgacgccataaccgacagcgatctggtgattgaaaccattgcggaagatgagcaaaccaagcatgaaatcctggcagccattgcggctacggtaaaaccggaggcgatcattgcgaccaatacctcctcgttgtcgctgaacaaactggcagcaggggtggaaaacaacccgcgctttatcggcctgcattttttcaatccggcgccgctgatgaagttgatcgaaatcattccctcttattttacctcccacgccaccagcctacgctgccagaagttggtaatagcattgggtaaacagtttgtggtctgcaaagccacgccgggctttattgttaatcgcatggcgcggcctttctatctggaagggttccggctgctggaggaaaacgtggcgctggcgccacagatcgaccgcgccctcaaggccggcgggcattttcgcatgggccctttagaactgacggattttatcggtcaggatatcaactaccaggtcagcaagcagatttggcaggatatgcagttcgaccctcgctatacccctggtcatttgcaacgctcgctggtggatgccgggctgctggggaggaaaaacgggcgctctttttttgcttcccaaccggcgacgccgcccaccccgaccacagagagcgacacgccaacgtcactgcatttttatggggagcatgctttattcgatcatctgcaacagcgtgctctggccgcctggcctgcgctgcgcgttcagcggttgccggaacggcctgaactggggcgatttatcctggtgaataacgcgctggcgatcaaaatcaccgatggcagaacggcaaacctgctcgccggcttaaccgctctcgacaccttcgtgattgacgctgcgctgaattacgccgacaccgcctatctggtggcagcccacaatcaacatgccacagagacgaataaagcgctgtttctgacgctgctgcaaaccgtcatcgctcaggtggagtttattaaagattcccctgccctgatcgttgcccgcgtactgagcagcctgatcaatgaatcggtgatcatggtggagagcggcgtttgcagccgggcagatatcgatatcgccgccgtggccggcgtgaactatgccgacggcatttttgcctggttggcgcagctcgggcagaaaaacgtgaaatcgacgctggataacatggcgcaactgctgcactccgcgcgctattacccgcattactctttgctgaacgcggcccggcctgagctggccgtagcgccctaa

SEQ ID NO: 104 - DNA, 1530 bp, Serratia marcescens 532
atggcagaaagtaatgcggcaattcaatcggctgcgattatcggcgcgggaacgatgggcagaggcatcgcttatcttttcgcgcaaaaaggcattcgcacggtgctttataatcgcaacggcaataccctcaatcaggctcgcgaatatatcgcgcaagacctgaacaagaaagtcgaacagggcaagatcgcgctgcaggataaaggcgcggtgctggccaatctgatgttcacttcagtgtttgaggccatcaccgacagcgagctggtgatagaaaccatcgccgagcaagaacaaaccaaacttgaggtgctggcggccatcgccgcggtggtcaagcccgacacgctgatcgccaccaatacctcctcactgtcgcttaacaagctggctactgcggtgacgcacagcgaacgctttatcggtttgcattttttcaaccccgcgccgctgatgaagctgattgaaatcattccggcctactttaccgcgcacgccaccaccgaacgctgccgccaactggtggcggcgttggggaaacacgatgtcgtctgccaggccacgccggggttcatcgtcaatcgcatggcccgcccctactacctggaagggttccgtctgttggaagaacacgtggcgcgcgcggcgcagatcgaccgcgctctcaaggccggcgggcgcttccgcatggggccgctcgagctgaccgattttatcggccaagacatcaactatcaggtcagtcggcaaatctggcaggacatgcaatacgacccgcgctatacccccggtcatctgcagcgttcactggtcgatgccggtctgttggggaaaaagaacggccgctcctattttgccgccgaagaaaccgccccgccggtgacggccgccagcaatgcagacgtcgagacgctgcgcgtttacggcgagcaccctttttttaccctgttacagcagcgagccgcgcttcagtggccacagctgcgcgtggaacaacggccggcattaccggggctggggtcggccgtccagatcaatgacgctttcaccgtcagcatcaccgatggccgcacggcgagccaactggccgagcagacggcagcagatgcctttgtggtcgatgtcgccctgaactacgccgacacgacgtatctggcggcggcgcacagccgccacgcctctgcggccaataaggcgctgtttttacgcctgctgcacacggcaatcccgcaggttgaatttatcaaggactctccggcgcttatcgtcgcccgcgtcctcagcagcctgatcaatgagtcggtgatcatggtggaaagcggcgtctgcagccgggaagacatcgatgtcgccgccgtcgcgggcgttaactacgccggcggcattttcgactggctcggcaaactgggggagaaaaacgtcaggacaacactgagcaatctggctcagctgctgcacgcggcgcgctatgcgccgcattacacccttctgcacgccgcgcaaccggcgctgacgaccacgccttaa

SEQ ID NO: 105 - DNA, 1530 bp, Serratia marcescens 2880STDY5683033
atggcagaaagtaatgcggcaattcaatcggctgcgattatcggcgcgggaacgatgggcagaggcatcgcttatcttttcgcgcaaaaaggcattcgcacggtgctttataatcgcaacggcaataccctcaatcaggctcgcgaatatatcgcgcacgacctgaacaagaaagtcgaacaaggcaagatcgcgctgcaggataaaggcgcggtgctggccaatctaatgttcacttcagtgtttgaggccatcgccgacagcgagctggtgatagaaaccatcgccgagcaagaacaaaccaaacttgaggtgctggcggccatcgccgcggtggtcaagcccgacacgctgatcgccaccaatacctcctcactgtcgcttaacaagctggctactgcggtgacgcacagcgaacgctttatcggtttgcattttttcaaccccgcgccgctgatgaagctgattgaaatcattccggcctactttaccgcgcacgccaccaccgaacgctgccgccaactggtagcggcgttggggaaacacgatgtcgtctgccaggccacgccggggttcatcgtcaatcgcatggcccgcccctactacctggaagggttccgcctgttggaagaacacgtggcgcgcgcggcgcagatcgaccgcgccctcaaggccggcgggcgcttccgcatggggccgctcgagctgaccgattttatcggccaagacatcaactatcaggtcagtcggcaaatctggcaggatatgcaatacgacccgcgctatacccccggtcatctgcagcgttcactggtcgatgccggtctgttggggaaaaagaacggccgctcctattttgccaccgaagaaaccgccccgccggtgacggccgccagcaatgcagacgtcgagacgctgcgcgtttacggcgagcaccctttttttaccctgttacagcagcgagccgcgcttcagtggccacagctgcgcgtggaacaacggccggcattaccggggctggggtcggccgtccagatcaatgacgctttcaccgtcagcatcaccgatggccgcacggcgagccaactggccgagcagacggcagcggatgcctttgtggtcgatgtcgccctgaactacgccgacacgacgtatctggcggcggcgcacagccgccacgcctctgcggccaataaggcgctgtttttacgcctgctgcacacggcaatcccgcaggttgaatttatcaaggactctccggcgcttatcgtcgcccgcgtcctcagcagcctgatcaatgagtcggtgatcatggtggaaagcggcgtctgcagccgggaagacatcgatgtcgccgccgtcgcgggcgttaactacgccggcggcattttcgactggctcggcaaactgggggagaaaaacgtcaggacaacgctgagcaatctggctcagctgctgcacgcggcgcgctatgcgccgcattacacccttctgcacgccgcgcaaccggcgctgacgaccacgccttaa

SEQ ID NO: 106 - DNA, 1530 bp, Serratia marcescens WW4
atggcagaaagtaatgcggcaattcaatcggctgcgattatcggcgcgggaacgatgggcagaggcatcgcttatcttttcgcgcaaaaaggcattcccacgatgctttataatcgcaacggcaataccctcaatcaagctcgcgaatatatcgcgcaagacctgaacaagaaagtcgaacagggcaagatcgcgctgcaggataaagacgcggtgctggccaatctgatgttcacttccgtgtttgaggccatcgccgacagcgagctggtgatagaaaccatcgccgagcaagaacaaaccaaacttgaggtgctggcggccatcgccgcagtggtcaagcccgacacgctgatcgccaccaatacctcctcactgtcgcttaacaagctggcaactgcggtgacgcacagcgagcgctttatcggtttgcattttttcaaccccgcgccgctgatgaagctgattgaaatcattccggcctactttaccgcacacgccaccacggaacgctgccgccaactggtggcggcgttggggaaacgcgatgtcgtctgccaggccacgccggggttcatcgtcaatcgcatggcccgcccctactacctggaagggttccgcctgttggaagaacatgtggcgcgcgcggcgcagatcgaccgcgccctcaaggccggcgggcgcttccgcatggggccgctcgagctgaccgattttatcggccaagacattaactatcaggtcagccggcaaatctggcaggacatgcaatacgacccgcgctatacccctggtcatctgcagcgttcactggtcgatgccggtctgttggggaaaaagaacggccgctcctattttgccgccgaagaaaccgccccgccggtgacggccgccaacaatgcagacgtcgagacgctgcgcgtttacggcgagcatcctttttttaccctgttgcagcagcgagccgcgcttcagtggccacagctgcgcgtggaacaacggccggcattaccggggctgggagcggccgtccagatcaatgacgctttcaccgtcagcatcaccgatggccgcacggcgagccaactggccgagcagacggcagcggatgcctttgtgatcgatgtcgccctgaactacgccgacaccacgtatctggtggcggcgcacagccgccacgcttctgcggccaataaggcgctgtttttacgcctgctgcacacggcaatcccgcaggttgaatttatcaaggactccccggcgcttatcgtcgcccgcgtcctcagcagcctgatcaatgagtcggtgatcatggtggaaagcggcgtctgcagccgggaagacatcgatgtcgccgccgtcgcgggcgttaactacgccggcggcattttcgactggctcggcaaactgggggagaaaaacgtcaggacgacgctgagcaatctggcgcagctgctgcacgcggcgcgctatgcgccgcattacacccttctgcacgccgcgcaaccggcgctgacgaccacgccttaa

SEQ ID NO: 107 - DNA, 1530 bp, Serratia marcescens K27
atggcagaaagtaatgcggcaattcaatcggctgcgattatcggcgcgggaacgatgggcagaggcatcgcttatcttttcgcgcaaaaaggcattcccacgatgctttataatcgcaacggcaataccctcaatcaagctcgcgaatatatcgcgcaagacctgaataagaaagtcgaacagggcaagatcgcgctgcaggataaagacgcggtgctggccaatctgatgttcacttccgtgtttgaggccatcgccgacagcgagctggtaatagaaaccatcgccgagcaagaacaaaccaaacttgaggtgctggcggccatcgccgcggtggtcaagcccgacacgctgatcgccaccaatacctcctcactgtcgctcaacaagctggcaactgcggtgacgcacagcgaacgctttatcggtttacattttttcaaccccgcgccgctgatgaagctgattgaaatcattccggcctactttaccgcgcacgccaccacggaacgctgccgccaactggtggcggcgttagggaaacgcgatgtcgtctgccaggccacgccggggttcatcgtcaatcgcatggcccgcccctactacctggaagggttccgcctgttggaagaacatgtggcgcgctcggcgcagatcgaccgcgccctcaaggccggcgggcgcttccgcatggggccgctcgagctgaccgattttatcggccaagacattaactatcaggtcagccggcaaatctggcaggacatgcaatacgacccgcgctatacccctggtcatctgcagcgttcactggtcgatgccggtctgttggggaaaaagaacggccgctcctattttgccgccgaagaaaccgccccgccggtgacggccgccaacaatgcagacgtcgagacgctgcgcgtttacggcgagcatcctttttttaccctgttgcagcagcgagccgcgcttcagtggccacagctgcgcgtggaacaacggccggcattaccggggctgggagcggccgtccagatcaatgacgctttcaccgtcagcatcaccgatggccgcacggcgagccaactggccgagcagacggcagcggatgcctttgtggtcgatgtcgccctgaactacgccgacaccacgtatctggtggcggcgcacagccgccacgcttctgcggccaataaggcgctgtttttacgcctgctgcacacggcaatcccgcaggttgaatttatcaaggactctccggcgcttatcgtcgcccgcgtcctcagcagcctgatcaatgagtcggtgatcatggtggaaagcggcgtctgcagccgggaagacatcgatgtcgccgccgtcgcgggcgttaactacgccggcggcattttcgactggctcggcaaactgggggagagaaacgtcaggacgacgctgagcaatctggcgcagctgctgcacgcggcgcgctatgcgccgcattacacccttctgcacgccgcgcaaccggcgctgacgaccacgccttaa

SEQ ID NO: 108 - DNA, 1530 bp, Serratia marcescens 280
atggcagaaagtaatgcggcaattcaatcggctgcgattatcggcgcgggaacgatgggcagaggcatcgcttatcttttcgcgcaaaaaggcattcccacgatgctttataatcgcaacggcaataccctcaatcaagctcgcgaatatatcgcgcaagacctgaataagaaagtcgaacagggcaagatcgcgctgcaggataaagacgcggtgctggccaatctgatgttcacttccgtgtttgaggccatcgccgacagcgagctggtaatagaaaccatcgccgagcaagaacaaaccaaacttgaggtgctggcggccatcgccgcagtggtcaagcccgacacgctgatcgccaccaatacctcctcactgtcgcttaacaagctggcaactgcggtaacgcacagcgaacgctttatcggtttgcattttttcaaccccgcgccgctgatgaagctgattgaaatcattccggcctactttaccgcgcacgccaccacggaacgctgccgccaactggtggcggcgttggggaaacgcgatgtcgtctgccaggccacgccggggttcatcgtcaatcgcatggcccgcccctactacctggaagggttccgcctgttggaagaacatgtggcgcgcgcggcgcagatcgaccgcgccctcaaggctggcgggcgcttccgcatggggccgctcgagctgaccgattttatcggccaagacatcaactatcaggtcagccggcaaatctggcaggacatgcaatacgacccgcgctatacccctggtcatctgcagcgttcactggtcgatgccggtctgttggggaaaaagaacggccgctcctattttgccgccgaagaaaccgccccgccggtgacggccgccaacaatgcagacgtcgagacgctgcgcgtttacggcgagcaccctttttttaccctgttgcagcagcgagccgcgcttcagtggccacagctgcgcgtggaacaacggccggcattaccggggctgggagcggccgtccagatcaatgacgctttcaccgtcagcatcaccgatggccgcacggcgagccaactggccgagcagacggcagcggatgcctttgtggtcgatgtcgccctgaactacgccgacaccacgtatctggtggcggcgcacagccgccacgcttctgctgccaataaggcgctgtttttactcctgctgcacacggcaatcccgcaggttgaatttatcaaggactccccggcgcttatcgtcgcccgcgtcctcagcagcctgatcaatgagtcggtgatcatggtggaaagcggcgtctgcagccgggaagacatcgatgtcgccgccgtcgcgggcgttaactacgccggcggcattttcgactggctcggcaagctgggggagaaaaacgtcaggacgacgctgagcaatctggcgcagctgctgcacgcggcgcgctatgcgccgcattacacccttctgcacgccgcgcaaccggcgctgacgaccacgccttaa

SEQ ID NO: 109 - DNA, 1530 bp, Serratia marcescens 19F
atggcagaaagtaatgcggcaattcaatcggctgcgattatcggcgcgggaacgatgggcagaggcatcgcttatcttttcgcgcaaaaaggcattcccacgatgctttataatcgcaacggcaataccctcaatcaagctcgcgaatatatcgcgcaagacctgaacaagaaagtcgaacagggcaagatcgcgctgcaggataaggacgcggtgctggccaatctgatgttcacttccgtgtttgaggccatcgccgacagcgagctggtaatagaaaccatcgccgagcaagaacaaaccaaacttgaggtgctggcggccatcgccgcggtggtcaagcacgacacgctgatcgccaccaatacctcctcactgtcgcttaacaagctggcaactgcggtgacgcacagcgaacgctttatcggtttgcattttttcaaccccgcgccgctgatgaagctgattgaaatcattccggcctactttaccgcgcacgccaccacggaacgctgccgccaactggtggcggcgttggggaaacgcgatgtcgtctgccaggccacgccggggttcatcgtcaatcgcatggcccgcccctactacctggaagggttccgcctgttggaagaacatgtggcgcgcgcggcgcagatcgaccgcgccctcaaggccggcgggcgcttccgcatggggccgctcgagctgaccgattttatcggccaagacattaactatcaggtcagccggcaaatctggcaggacatgcaatacgacccgcgctatacccctggtcatctgcagcgttcactggtcgatgccggtctgttggggaaaaagaacggccgctcctattttgccgccgaagaaaccgccccgccggtgacggccgccaacaatgcagacgtcgagacgctgcgcgtttacggcgagcatcctttttttaccctgttgcagcagcgagccgcgcttcagtggccacagctgcgcgtggaacaacggccggcattaccggggctgggagcggccgtccagatcaatgacgctttcaccgtcagcatcaccgatggccgcacggcgagccaactggccgagcagacggcagcggatgcctttgtggtcgatgtcgccctgaactacgccgacaccacgtatctggtggcggcgcacagccgccacgcttctgcggccaataaggcgctgtttttacgcctgctgcacacggcaatcccgcaggttgaatttatcaaggactccccggcgcttatcgtcgcccgcgtcctcagcagcctgatcaatgagtcggtgatcatggtggaaagcggcgtctgcagccgggaagacatcgatgtcgccgccgtcgcgggcgttaactacgccggcggcattttcgactggctcggcaaactgggggagaaaaacgtcaggacgacgctgagcaatctggcgcagctgctgcacgcggcgcgctatgcgccgcattacacccttctgcacgccgcgcaaccggcgctgacgaccacgccttaa

SEQ ID NO: 110 - DNA, 1530 bp, Serratia marcescens 1185
atggcagaaagtaatgcggcaattcaatcggctgcgattatcggcgcgggaacgatgggcagaggcatcgcttatcttttcgcgcaaaaaggcattcccacgatgctttataatcgcaacggcaataccctcaatcaagctcgcgaatatatcgcgcaagacctgaacaagaaagtcgaacagggcaagatcgcgctgcgggataaagacgcggtgctggccaatctgatgttcacttccgtgtttgaggccatcgccgacagcgagctggtgatagaaaccatcgccgagcaagaacaaaccaaacttgaggtgctggcggccatcgccgcggtggtcaagcccgacacgctgatcgccaccaatacctcctcactgtcgcttaacaagctggctactgcggtgacgcacagcgaacgctttatcggtttgcattttttcaaccccgcgccgctgatgaagctgattgaaatcattccggcctactttaccgcgcacgccaccaccgaacgctgccgccaactggtggcggcgttggggaaacacgatgtcgtctgccaggccacgccggggttcatcgtcaatcgcatggcccgcccctactacctggaagggttccgcctgttggaagaacatgtggcgcgcgcggcgcagatcgaccgcgccctcaaggccggcgggcgcttccgcatggggccgctcgagctgaccgattttatcggccaagacatcaactatcaggtcagccggcaaatctggcaggacatgcaatacgacccgcgctatacccctggtcatctgcagcgttcactggtcgatgccggtctgttggggaaaaagaacggccgctcttattttgccgccgaagaaaccgccccgccggtgacggccgccaacaatgcagacgtcgagacgctgcgcgtttacggcgagcatcctttttttaccctgttgcagcagcgagccgcgcttcagtggccacagctgcgcgtggaacaacggccggcattaccggggctgggagcggccgtccagatcaatgacgctttcaccgtcagcatcaccgatggccgcacggcgagccaactggccgagcagacggcagcggatgcctttgtggtcgatctcgccctgaactacgccgacaccacgtatctggtggcggcgcacagccgccacgcttctgcggccaataaggcgctgtttttacgcctgctgcacacggcaatcccgcaggttgaatttatcaaggactctccggcgcttatcgtggcccgcgtcctcagcagcctgatcaatgagtcggtgatcatggtggaaagcggcgtctgcagccgggaagacatcgatgtcgccgccgtcgcgggcgttaactacgccggcggcattttcgactggctcggcaaactgggggagaaaaacgtcaggacgacgctgagcaatctggcgcagctgctgcacgcggcgcgctatgcgccgcattacacccttctgcacgccgcgcaatcggcgctgacgaccacgccttaa

SEQ ID NO: 111 - DNA, 1530 bp, Serratia marcescens S2I7
atggcagaaagtaatgcggcaattcaatcggctgcgattatcggcgcgggaacgatgggcagaggcatcgcttatcttttcgcgcaaaaaggcattcccacgatgctttataatcgcaacggcaataccctcaatcaagctcgcgaatatatcgcgcaagatctgaataagaaagtcgaacagggcaagatcgcgctgcaggataaggacgcggtgctggccaatctgatgttcacttccgtgtttgaggccatcgccgacagcgagctggtgatagaaaccatcgccgagcaagaacaaaccaaacttgaggtgctggcggccatcgccgcggtggtcaagcccgacacgctgatcgccaccaatacctcctcactgtcgcttaacaagctggcaactgcggtgacgcacagcgaacgctttatcggtttgcattttttcaaccccgcgccgctgatgaagctgattgaaatcattccggcctactttaccgcgcacgccaccacggaacgctgccgccaactggtggcggcgttggggaaacgcgatgtcgtctgccaggccacgccggggttcatcgtcaatcgcatggcccgcccctactacctggaagggttccgcctgttggaagaacatgtggcgcgcgcggcgcagatcgaccgcgccctcaaggccggcgggcgcttccgcatggggccgctcgagctgaccgattttatcggccaagacatcaactatcaggtcagccggcaaatctggcaggacatgcaatacgacccgcgctatacccctggtcatctgcagcgttcactggtcgatgccggtctgttggggaaaaagaacggccgctcctattttgccgccgaagaaaccgccccgccggtgacggccgccaacaatgcagacgtcgagacgctgcgcgtttacggcgagcatcctttttttaccctgttgcagcagcgagccgcgcttcagtggccacagctgtgcgtggaacaacggccggcattaccggggctgggagcggccgtccagatcaatgacgctttcaccgtcagcatcaccgatggccgcacggcgagccaactggccgagcagacagcagcggatgcctttgtggtcgatgtcgccctgaactacgccgacaccacgtatctggtggcagcgcacagccgccacgcttctgcggccaataaggcgctgtttttacgcctgctgcacacggcaatcccgcaggttgaatttatcaaggactctccggcgcttatcgtcgcccgcgtcctcagcagcctgatcaatgagtcggtgatcatggtggaaagcggcgtctgcagccgggaagacatcgatgtcgccgccgtcgcgggcgttaactacgccggcggcattttcgactggctcggcaaactgggggagagaaacgtcaggacgacgctgagcaatctggcgcagctgctgcacgcggcgcgctatgcgccgcattacacccttctgcacgccgcgcaaccggcgctgacgaccacgccttaa

SEQ ID NO: 112 - DNA, 1530 bp, Serratia marcescens KHCo-24B
atggcagaaagtaatgcggcaattcaatcggctgcgattatcggcgcgggaacgatgggcagaggcatcgcttatcttttcgcgcaaaaaggcattcccacgatgctttataatcgcaacggcaataccctcaatcaagctcgcgaatatatcgcgcaagacctgaataagaaagtcgaacagggcaagatcgcgctgcgggataaagacgcggtgctggccaatctgatgttcacttccgtgtttgaggccatcgccgacagcgagctggtgatagaaaccatcgccgagcaagaacaaaccaaacttgaggtgctggcggccatcgccgcagtggtcaagcccgacacgctgatcgccaccaatacctcctcactgtcgctcaacaagctggcaacggcggtaacgcacagcgaacgctttatcggtttgcattttttcaaccccgcgccgctgatgaagctgattgaaatcattccggcctactttaccgcgcacgccaccacggaacgctgccgccaactggtggcggcgttggggaaacgcgatgtcgtctgccaggccacgccggggttcatcgtcaatcgcatggcccgcccctactacctggaagggttccgcctgttggaagaacatgtggcgcgcgcggcgcagatcgaccgcgccctcaaggctggcgggcgcttccgcatggggccgctcgagctgaccgattttatcggccaagacatcaactatcaggtcagccggcaaatctggcaggacatgcaatacgacccgcgctatacccctggtcatctgcagcgttcactggtcgatgccggtctgttggggaaaaagaacggccgctcctattttgccgccgaagaaaccgccccgccggtgacggccgccaacaatgcagacgtcgagacgctgcgcgtttacggcgagcatcctttttttaccctgttgcagcagcgagccgcgcttcagtggccacagctgcgcgtggaacaacggccggcattaccggggctgggagcggccgtccagatcaatgacgctttcaccgtcagcatcaccgatggccgcacggcgagccaactggccgagcaggcggcagcggatgcctttgtggtcgatctcgccctgaactacgccgacaccacgtatctggtggcggcgcacagccgccacgcttctgcggccaataaggcgctgtttttacgcctgctgcacacggcaatcccgcaggttgaatttatcaaggactctccggcgcttatcgtcgcccgcgtcctcagcagcctgatcaatgagtcggtgatcatggtggaaagcggcgtctgcagccgggaagacatcgatgtcgccgccgtcgcgggcgttaactacgccggcggcattttcgactggctcggcaaactgggggagaaaaacgtcaggacgacgctgagcaatctggcgcagctgctgcacgcggcgcgctatgcgccgcattacacccttctgcacgccgcgcaaccggcgctgacgaccacgccttaa

SEQ ID NO: 113 - DNA, 1530 bp, Serratia marcescens Z6
atggcagaaagtaatgcggcaattcaatcggctgcgattattggcgcgggaacgatgggcagaggcatcgcttatcttttcgcgcaaaaaggcattcccacgatgctttataatcgcaacggcaataccctcaatcaagctcgcgaatatatcgcgcaagacctgaacaagaaagtcgaacagggcaagatcgcgctgcaggataaagacgcggtgctggccaatctgatgttcacttccgtgtttgaggccatcgccgacagcgagctggtgatagaaaccatcgccgagcaagaacaaaccaaacttgaggtgctggcggccatcgccgcggtggtcaagcccgacacgctgatcgccaccaatacctcctcactgtcgcttaacaagctggcaactgcggtgacgcacagagagcgctttatcggtttgcattttttcaaccccgcgccgctgatgaagctgattgaaatcattccggcctactttaccgcgcacgccaccacggaacgctgccgccaactggtggcggcgttggggaaacgcgatgtcgtctgccaggccacgccggggttcatcgtcaatcgcatggcccgcccctactacctggaagggttccgcctgttggaagaacatgtggcgcgcgcggcgcagatcgaccgcgccctcaaggccggcgggcgcttccgcatggggccgctcgagctgaccgattttatcggccaagacattaactatcaggtcagccggcaaatctggcaggacatgcaatacgacccgcgctatacccctggtcatttgcagcgttcactggtcgatgccggtctgttggggaaaaagaacggccgctcctattttgccgccgaagaaaccgccccgccggtgacggccgccaacaatgcagacgtcgagacgctgcgcgtttacggcgagcaccctttttttaccctgttgcagcagcgagccgcgcttcagtggccacagctgtgcgtggaacaacggccggcattaccggggctgggagcggccgtccagataaatgacgctttcaccgtcagcatcaccgatggccgcacggcgagccaactggccgagcagacggcagcggatgcctttgtgatcgatgtcgccctgaactacgccgacaccacgtatctggtggcagcgcacagccgccacgcttctgcggccaataaggcgctgtttttacgcctgctgcacacggcaatcccgcaggttgaatttatcaaggactccccggcgcttatcgtcgcccgcgtcctcagcagcctgatcaatgagtcggtgatcatggtggaaagcggcgtctgcagccgggaagacatcgatgtcgccgccgtcgcgggcgttaactacgccggcggcattttcgactggctcggcaagctgggggagaaaaacgtcaggacgacgctgagcaatctggcgcagctgctgcacgcggcgcgctatgcgccgcattacaccctcctgcacgccgcgcaaccggcgctgacgaccacgccttaa

SEQ ID NO: 114 - DNA, 1530 bp, Serratia marcescens 546
atggcagaaagtaatgcggcaattcaatcggctgcgattatcggcgcgggaacgatgggcagaggcatcgcttatcttttcgcgcaaaaaggcattcccacgatgctttataatcgcaacggcaataccctaaatcaagctcgcgaatatatcgcgcaagacctgaacaagaaagtcgaacagggcaagatcgcgctgcgggataaagacgcggtgctggccaatctgatgttcacttccgtgtttgaggccatcgccgacagcgagctggtgatagaaaccatcgccgagcaagaacaaaccaaacttgaggtgctggcggccatcgccgcagtggtcaagcccgacacgctgatcgccaccaatacctcctcactgtcgcttaacaagctgtcaactgcggtaacgcacaacgaacgctttatcggtttgcattttttcaaccccgcgccgctgatgaagctgattgaaatcattccggcctactttaccgcgcacgccaccacggaacgctgccgccaactggtggcggcgttggggaaacgcgatgtcgtctgccaggccacgccggggttcatcgtcaatcgcatggcccgcccctactacctggaagggttccgcctgttggaagaacatgtggcgcgcgcggcgcagatcgaccgcgccctcaaggccggcgggcgcttccgcatggggccgctcgagctgaccgattttatcggccaagacatcaactatcaggtcagccggcaaatctggcaggacatgcaatacgacccgcgctatacccctggtcatctgcagcgttcactggtcgatgccggtctgttggggaaaaagaacggccgctcctattttgccgccgaagaaaccgccccgccggtgacggccgccaacaatgcagacgtcgagacgctgcgcgtttacggcgagcaccctttttttaccctgttgcagcagcgagccgcgcttcagtggccacagctgcgcgtggaacaacggccggcattaccggggctgggagcggccgtccggatcaatgacgctttcaccgtcagcatcaccgatggccgcacggcgagccaactggccgagcagacggcagcggatgcctttgtggtcgatgtcgccctgaactacgccgacaccacgtatctggtggcggcgcacagccgccacgcttctgcggccaataaggcgctgtttttacgcctgctgcacacggcaatcccgcaggttgaatttatcaaggactctccggcgcttatcgtcgcccgcgtcctcagcagcctgatcaatgagtcggtgatcatggtggaaagcggcgtctgcagccgggaagacatcgatgtcgccgccgtcgcgggcgttaactacgccggcggcattttcgactggctcggcaaactgggggagaaaaacgtcaggacgacgctgagcaatctggcgcagctgctgcacgcggcgcgctatgcgccgcattacacccttctgcacgccgcgcaaccggcgctgacgaccacgccttaa

SEQ ID NO: 115 - DNA, 1530 bp, Serratia nematodiphila MB307
atggcagaaagtaatgcggcaattcaatcggctgcgattatcggcgcgggaacgatgggcagaggcatcgcttatcttttcgcgcaaaaaggcattcccacgatgctttataatcgcaacggcaataccctcaatcaagctcgcgaatatatcgcgcaagacctgaataagaaagtcgaacagggcaagatcgcgctgcgggataaagacgcggtgctggccaatctgatgttcacttccgtgtttgaggccatcgccgacagcgagctggtgatagaaaccatcgccgagcaagaacaaaccaaacttgaggtgctggcggccatcgccgcagtggtcaagcccgacacgctgatcgccaccaatacctcctcactgtcgctcaacaagctggcaacggcggtaacgcacagcgaacgctttatcggtttgcattttttcaaccccgcgccgctgatgaagctgattgaaatcattccggcctactttaccgcgcacgccaccacggaacgctgccgccaactggtggcggcgttggggaaacgcgatgtcgtctgccaggccacgccgggtttcatcgtcaatcgcatggcccgcccctactacctggaagggttccgcctgttggaagaacatgtggcgcgcgcggcgcagatcgaccgcgccctcaaggctggcgggcgcttccgcatggggccgctcgagctgaccgattttatcggccaagacatcaactatcaggtcagccggcaaatctggcaggacatgcaatacgacccgcgctatacccctggtcatctgcagcgttcactggtcgatgccggtctgttggggaaaaagaacggccgctcctattttgccgccgaagaaaccgccccgcaggtgacggccgccaacaatgcagacgtcgagacgctgcgcgtttacggcgagcatcctttttttaccctgttgcagcagcgagccgcgcttcagtggccacagctgcgcgtggaacaacggccggcattaccggggctgggagcggccgtccagatcaatgacgctttcaccgtcagcatcaccgatggccgcacggcgagccaactggccgagcagacggcagcggatgcctttgtggtcgatctcgccctgaactacgccgacaccacgtatctggtggcggcgcacagccgccacgcttctgcggccaataaggcgctgtttttacgcctgctgcacacggcaatcccgcaggttgaatttatcaaggactctccggcgcttatcgtcgcccgcgtcctcagcagcctgatcaatgagtcggtgatcatggtggaaagcggcgtctgcagccgggaagacatcgatgtcgccgccgtcgcgggcgttaactacgccggcggcattttcgactggctcggcaaactgggggagaaaaacgtcaggacgacgctgagcaatctggcgcagctgctgcacgcggcgcgctatgcgccgcattacacccttctgcacgccgcgcaaccggcgctgacgaccacgccttaa

SEQ ID NO: 116 - DNA, 1530 bp, Serratia marcescens VGH107
atggcagaaagtaatgcggcaattcaatcggctgcgattatcggcgcgggaacgatgggcagaggcatcgcttatcttttcgcgcaaaaaggcattcccacgatgctttataatcgcaacggcaataccctcaatcaagctcgcgaatatatcgcgcaagacctgaataagaaagtcgaacagggcaagatcgcgctgcaggataaggacgcggtgctggccaatctgatgttcacttccgtgtttgaggccatcgccgacagcgagctggtaatagaaaccatcgccgagcaagaacaaaccaaacttgaggtgctggcggccatcgccgcggtggtcaagcacgacacgctgatcgccaccaatacctcctcactgtcgctcaacaagctggcaactgcggtgacgcacagcgaacgctttatcggtttgcattttttcaaccccgcgccgctgatgaagctgattgaaatcattccggcctactttaccgcgcacgccaccacggaacgctgccgccaactggtggcggcgttggggaaacgcgatgtcgtctgccaggccacgccggggttcatcgtcaatcgcatggcccgcccctactacctggaagggttccgcctgttggaagaacatgtggcgcgcgcggcgcagatcgaccgcgccctcaaggccggcgggcgcttccgcatggggccgctcgagctgaccgattttattggccaagacattaactatcaggtcagccggcaaatctggcaggacatgcaatacgacccgcgctatacccctggtcatctgcagcgttcactggtcgatgccggtctgttggggaaaaagaacggccgctcctattttgccgccgaagaaaccgccccgccggtgacggccgccaacaatgcagacgtcgagacgctgcgcgtttacggcgagcatcctttttttaccctgttgcagcagcgagccgcgcttcagtggccacagctgcgcgtggaacaacggccggcattaccggggctgggagcggccgtccagatcaatgacgctttcaccgtaagcatcaccgatggccgcacggcgagccaactggccgagcagacggcagcggatgcctttgtggtcgatgtcgccctgaactacgccgacaccacgtatctggtggcggcgcacagccgccacgcttctgcggccaataaggcgctgtttttgcgcctgctgcacacggcaatcccgcaggttgaatttatcaaggactctccggcgcttatcgtcgcccgcgtcctcagcagcctgatcaatgagtcggtgatcatggtggaaagcggcgtctgcagccgggaagacatcgatgtcgccgccgtcgcgggcgttaactacgccggcggcattttcgactggctcggcaaactgggggagaaaaacgtcaggacgatgctgagcaatctggcgcagctgctgcacgcggcgcgctatgcgccgcattacaaccttctgcacgccgcgcaaccggcgctgacgaccacgccttaa

SEQ ID NO: 117 - DNA, 1530 bp, Serratia marcescens MCB
atggcagaaagtaatgcggcaattcaatcggctgcgattatcggcgcgggaacgatgggcagaggcatcgcttatcttttcgcgcaaaagggcattcgtacggtgctttataatcgcaacggcaataccctcaatcaggctcgcgaatatatcgcgcaagacctgaacaagaaagtcgaacagggcaagatcgcgctgcaggataaaagctcagtgctggccaatctggtgttctcgacggcgcttgaggctatcgccgacagcgagttggtgatagaaaccatcgccgagcatgaacaaaccaaacttgaggtgttggcggccatcgccgcggtggtcaagcccgatacgctgatcgccaccaatacctcctcactgtcgcttaacaagctggcaaccgcggtgacgcacagcgagcggtttatcggtttgcactttttcaaccctgcgccgctgatgaaactgattgaaatcatcccggcctactttaccgcacacgccaccacggaacgttgccgtcaactggtggccgcgttggggaaacgcgatgtcgtctgtcaggccacgccggggtttatcgttaaccgcatggcccgcccctactacctggaagggttccgcctgttggaagaacacgtggcgcgcgcgccgcagatcgaccgtgccctcaaggccggcggacacttccgcatggggccgctcgagctgaccgatttcatcggccaggacatcaactatcaggtcagtcggcaaatctggcaggacatgcaatacgacccgcgctatacccccggccatctgcagcgttcgctggtcgatgccggtctgttggggaaaaagaacggccgttcctattttaccgccgaagaaaccgccccgccggtgacggctgccatcggtgcagacgtcgagacgctgcgcatttacggcgaacatcctttttttaccctgttgcaacagcgggccgcacttcagtggccacagctgcgcgtggaacaacggccggccttaccaggcgtggggccggccgtccagatcaatgacgcattcaccgtcagcatcaccgacggccgtacggcgagccagttagccgagcagacgacggctgacgcttttgtggtcgatatcgccctgaactacgccgacacggcgtacctggttgcggcgcacaatcgccacgcctctgcggccaataaggcgctgtttttacgcctgttgcacaccgcaattccgcaggttgaatttatcaaagactccccggcgctgatcgtcgctcgcgtcctcagcagcctgatcaatgagtcggtgatcatggtggaaagcggcgtttgcagccgggaagacattgatgtcgccgccgtcgcgggcgttaactacgccggcggcattttcgactggctcagcaagctgggggagaaaaacgtcaggacgacgctgagcaatctggcgcagttgctgcacgcggcgcgttatgcgccgcattacacccttctgcacgccgcgcaaccggcgctgacgaccacgccttga

SEQ ID NO: 118 - DNA, 1530 bp, Serratia marcescens AH0650
atggcagaaagtaatgcggcaattcaatcggctgcgattatcggcgcgggaacgatgggcagaggcatcgcttatcttttcgcgcaaaaaggcattcgtacggtgctttataatcgcaacggcaataccctcaatcaggctcgcgaatatatcgcgcaagacctgaacaagaaagtcgaacagggcaagatcgcgctgcaggataaaagctcagtgctggccaatctggtgttctcgacggcgcttgaggctatcgccgacagcgagttggtgatagaaaccatcgccgagcatgaacaaaccaaacttgaggtgttggcggccatcgccgcggtggtcaagcccgatacgctgatcgccaccaatacctcctcactgtcgcttaacaagctggcaaccgcggtgacgcacagcgagcggtttatcggtttgcactttttcaaccctgcgccgctgatgaaactgattgaaatcatcccggcctactttaccgcacacgccaccacggaacgttgccgtcaactggtggccgcgttggggaaacgcgatgtcgtctgtcaggccacgccggggtttatcgttaaccgcatggcccgcccctactacctggaagggttccgcctgttggaagaacacgtggcgcgcgcgccgcagatcgaccgtgccctcaaggccggcggacacttccgcatggggccgctcgagctgaccgattttatcggccaggacatcaactatcaggtcagccggcaaatctggcaggacatgcaatacgacccgcgctatacccccggccatctgcagcgttcgctggtcgatgccggtctgttggggaaaaagaacggccgctcctattttgccgccgaagaaaccgccccgccagtgacggccgccatcgatgcagacgtcgagacgctgcgcgtttacggcgaacaccctttttttaccctgttgcaacagcgagccgcacgtcagtggccacagctgcgcgtggaacaacggccggccttaccgagcctggggccggccgtccagatcaatgacgcattcaccgtcagcatcaccgatggccgcacggcgagccagttagccgagcagacgacggctgacgcttttgtggtcgacatcgccctgaactacgccgacacggcgtatctggttgcggcgcacaatcgctatgcctctgcggccaataaggcgctgtttttacgcctgctgcacactgcgatcccgcaggttgaatttatcaaagactccccggcgctgatcgtcgctcgtgtcctcagcagcctgatcaatgagtcggtgatcatggtggaaagcggcgtttgcagccgggaagacattgatgtcgccgccgtcgcgggcgttaactacgccggcggcattttcgactggctcggcaaactgggggagaaaaacgtcaggacgacgctgagcaatctggcgcagctgctgcacgcagcgcgctatgcgccgcattacacccttctgcacgccgcgcaaccggcgctgacgaccacgccttga

SEQ ID NO: 119 - DNA, 1530 bp, Serratia marcescens UMH12
atggcagaaagtaatgcggaaattcaatcggctgcgattatcggcgcgggaacgatgggcagaggcatcgcttatcttttcgcgcaaaaaggcattcgtacggtgctttataatcgcaacggcaataccctcaatcaggctcgcgaatatatcgcgcaagacctgaacaagaaagtcgaacagggcaagatcgcgctgcaggataaaagctcagtgctggccaatctggtgttctcgacggcgcttgaggctatcgccgacagcgagttggtgatagaaaccatcgccgagcatgaacaaaccaaacttgaggtgttggcggccatcgccgcggtggtcaagcccgatacgctgatcgccaccaatacctcctcactgtcgcttaacaagctggcaaccgcggtgacgcacagcgagcggtttatcggtttgcactttttcaaccctgcgccgctgatgaaactgattgaaatcatcccggcctactttaccgcacacgccaccacggaacgttgccgtcaactggtggccgcgttggggaaacgcgatgtcgtctgtcaggccacgccggggtttatcgttaaccgcatggcccgcccctactacctggaagggttccgcctgttggaagaacacgtggcgcgcgcgccgcagatcgaccgtgccctcaaggccggcggacacttccgcatggggccgctcgagctgaccgattttatcggccaggacatcaactatcaggtcagccggcaaatctggcaggacatgcaatacgacccgcgctatacccccggccatctgcagcgttcgctggtcgatgccggtctgttggggaaaaagaacggccgctcctattttgccgccgaagaaaccgccccgccagtgacggccgccatcgatgcagacgtcgagacgctgcgcgtttacggcgaacaccctttttttaccctgttgcaacagcgagccgcacgtcagtggccacagctgcgcgtggaacaacggccggccttaccgagcctggggccggccgtccagatcaatgacgcattcaccgtcagcatcaccgatggccgcacggcgagccagttagccgagcagacgacggctgacgcttttgtggtcgacatcgccctgaactacgccgacacggcgtatctggttgcggcgcacaatcgctatgcctctgcggccaataaggcgctgtttttacgcctgctgcacactgcgatcccgcaggttgaatttatcaaagactccccggcgctgatcgtcgctcgtgtcctcagcagcctgatcaatgagtcggtgatcatggtggaaagcggcgtttgcagccgggaagacattgatgtcgccgccgtcgcgggcgttaactacgccggcggcattttcgactggctcggcaaactgggggagaaaaacgtcaggacgacgctgagcaatctggcgcagctgctgcacgcagcgcgctatgcgccgcattacacccttctgcacgccgcgcaaccggcgctgacgaccacgccttga

SEQ ID NO: 120 - DNA, 1530 bp, Serratia sp. OMLW3
atggcagaaagtaatgcggcaattcaatcggctgcgattatcggcgcgggaacgatgggcagaggcatcgcttatcttttcgcgcaaaaaggcattcgtacggtgctttataatcgcaacggcaataccctcaatcaggctcgcgaatatatcgcgcaagacctgaacaagaaagtcgaacagggcaagatcgcgctgcaggataaaagctcagtgctggccaatctggtgttctcgacggcgcttgtggctatcgccgacagcgagttggtgatagaaaccatcgccgagcatgaacaaaccaaacttgaggtgttggcggccatcgccgcggtggtcaagcccgatacgctgatcgccaccaatacctcctcactgtcgcttaacaagctggcaaccgcggtgacgcacagcgagcggtttatcggtttgcactttttcaaccctgcgccgctgatgaaactgattgaaatcatcccggcctactttaccgcacacgccaccacggaacgttgccgtcaactggtggccgcgttggggaaacgcgatgtcgtctgtcaggccacgccggggtttatcgtcaaccgcatggcccgcccctactacctggaagggttccgcctgttggaagagcacgtggcgcgcgcgccgcagatcgaccgtgccctcaaggccggcggacacttccgcatggggccgctcgagctgaccgattttatcggccaggacatcaactatcaggtcagccggcaaatctggcaggacatgcaatacgacccgcgctatacccccggccatctgcagcgttcgctggtcgatgccggtctgttggggaaaaagaacggccgctcctattttgccgccgaagaaaccgccccgccagtgacggccgccatcgatgcagacgtcgagacgctgcgcgtttacggcgaacaccctttttttaccctgttgcaacagcgagccgcacgtcagtggccacagctgcgcgtggaacaacggccggccttaccgagcctggggccggccgtccagatcaatgacgcattcaccgtcagcatcaccgatggccgcacggcgagccagttagccgagcagacgacggctgacgcttttgtggtcgacatcgccctgaactacgccgacacggcgtatctggttgcggcgcacaatcgctatgcctctgcggccaataaggcgctgtttttacgcctgctgcacactgcgatcccgcaggttgaatttatcaaagattccccggcgctgatcgtcgctcgcgtcctcagcagcctgatcaatgagtcggtgatcatggtggaaagcggcgtctgcagccgggaagacattgatgtcgccgccgtcgcgggcgttaactacgccggcggcattttcgactggctcggcaaactgggggagaaaaacgtcaggacgacgctgagcaatctggcgcagctgctgcacgcagcgcgctatgcgccgcattacacccttctgcacgccgcgcaaccggcgctgacgaccacgccttga

SEQ ID NO: 121 - DNA, 1530 bp, Serratia marcescens UMH11
atggcagaaagtaatgcggcaattcaatcggctgcgattatcggcgcgggaacgatgggcagaggcatcgcttatcttttcgcgcaaaaaggcattcgtacggtgctttataatcgcagcggcaataccctcaatcaggctcgcgaatatatcgcgcaagacctgaacaagaaagtcgaacagggcaagatcgcgctgcaggataaaagctcagtgctggccaatctggtgttctcgacggcgcttgtggctatcgccgacagcgagttggtgatagaaaccatcgccgagcatgaacaaaccaaacttgaggtgttggcggccatcgccgcggtggtcaagcccgatacgctgatcgccaccaatacctcctcactgtcgcttaacaagctggcaaccgcggtgacgcacagcgagcggtttatcggtttgcactttttcaaccctgcgccgctgatgaaactgattgaaatcatcccggcctactttaccgcacacgccaccacggaacgttgccgtcaactggtggccgcgttggggaaacgcgatgtcgtctgtcaggccacgccggggtttatcgtcaaccgcatggcccgcccctactacctggaagggttccgcctgttggaagagcacgtggcgcgcgcgccgcagatcgaccgtgccctcaaggccggcggacacttccgcatggggccgctcgagctgaccgattttatcggccaggacatcaactatcaggtcagccggcaaatctggcaggacatgcaatacgacccgcgctatacccccggccatctgcagcgttcgctggtcgatgccggtctgttggggaaaaagaacggccgctcctattttgccgccgaagaaaccgccccgccagtgacggccgccatcgatgcagacgtcgagacgctgcgcgtttacggcgaacaccctttttttaccctgttgcaacagcgagccgcacgtcagtggccacagctgcgcgtggaacaacggccggccttaccgagcctggggccggccgtccagatcaatgacgcattcaccgtcagcatcaccgatggccgcacggcgagccagttagccgagcagacgacggctgacgcttttgtggtcgacatcgccctgaactacgccgacacggcgtatctggttgcggcgcacaatcgctatgcctctgcggccaataaggcgctgtttttacgcctgctgcacactgcgatcccgcaggttgaatttatcaaagattccccggcgctgatcgtcgctcgcgtcctcagcagcctgatcaatgagtcggtgatcatggtggaaagcggcgtctgcagccgggaagacattgatgtcgccgccgtcgcgggcgttaactacgccggcggcattttcgactggctcggcaaactgggggagaaaaacgtcaggacgacgctgagcaatctggcgcaactgctgcacgcagcgcgctatgcgccgcattacacccttctgcacgccgcgcaaccggcgctgacgaccacgccttga

SEQ ID NO: 122 - DNA, 1530 bp, Serratia marcescens UMH1
atggcagaaagtaatgcggcaattcaatcggctgcgattatcggcgcgggaacgatgggcagaggtatcgcttatcttttcgcgcaaaaaggcattcgtacggtgctttataatcgcaacggcaataccctcaatcaggctcgcgaatatatcgcgcaagacctgaacaagaaagtcgaacagggcaagatcgcgctgcaggataaaagctcagtgctggccaatctggtgttctcgacggcgcttgaggctatcgccgacagcgagttggtgatagaaaccatcgctgagcatgaacaaaccaaacttgaggtgttggcggccatcgccgcggtggtcaagcccgatacgctgatcgccaccaatacctcctcactgtcgcttaacaagctggcaaccgcggtgacgcacagcgagcggtttatcggtttgcactttttcaaccctgcgccgctgatgaaactgattgaaatcatcccggcctactttaccgcacatgccaccacggaacgttgccgtcaactggtggccgcgttggggaaacgcgatgtcgtctgccaggccacgccggggtttatcgttaaccgcatggcccgcccctactacctggaagggttccgcctgttggaagaacacgtggcgcgcgcgccgcagatcgaccgtgccctcaaggccggcggacacttccgcatggggccgctcgagctgaccgattttatcggccaggacatcaactatcaggtcagccggcaaatctggcaggacatgcaatacgacccgcgctatacccccggccatctgcagcgttcgctggtcgatgccggtctgttggggaaaaagaacggccgctcctattttgccgccgaagaaaccgccccgccagtgacggccgccatcgatgcagacgtcgagacgctgcgcgtttacggcgaacaccctttttttaccctgttgcaacagcaagccgcacgtcagtggccacagctgcgcgtggaacaacggccggccttaccgagcctggggccggccgtccagatcaatggcgcattcaccgtcagcatcaccgatggccgcacggcgagccagttagccgagcagacgacggctgacgcttttgtgatcgacatcgccctgaactacgccgacacggcgtatctggttgcggcgcacaatcgctatgcctctgcggccaataaggcgctgtttttacgcctgctgcacactgcgatcccgcaggttgaatttatcaaagactccccggcgctgatcgtcgctcgtgtcctcagcagcctgatcaatgagtcggtgatcatggtggaaagcggcgtttgcagccgggaagacattgatgtcgccgccgtcgcgggcgttaactacgccggcggcattttcgactggctcggcaaactgggggagaaaaacgtcaggacgacgctgagcaatctggcgcagctgctgcacgcagcgcgctatgcgccgcattacacccttctgcacgccgcgcaaccggcgctgacgaccacgccttga

SEQ ID NO: 123 - DNA, 1530 bp, Serratia marcescens 2880STDY5683020
atggcagaaagtaatgcggcaattcaatcggctgcgattatcggcgcgggaacgatgggcagaggcatcgcttatcttttcgcgcaaaaaggcattcgcacggtgctttataatcgcaacggcaataccctcaatcaggctcgcgaatatatcgcgcaagacctgaacaagaaagtcgaacagggcaagatcgcgctgcaggataaaggcgcagtgctggccaatctggtgttcacctcggtgtttgagactatcgccgacagcgatctggtgatagaaaccatcgccgagcaagagcaaaccaaacttgaggtgctggcggccatcgccgcggcggtcaagcccgacacgctgatcgccaccaatacctcctcactgtcgcttaacaagctggcaaccgcggtgacgcacagcgagcggtttatcggtttgcactttttcaatcccgcgccgctgatgaaactgattgaaatcatcccggcctactttaccgcacgcgccaccaccgaacgttgccgtcagctggtagccgcgttggggaaacgcgatgtcgtctgccaggccacgccggggtttatcgtcaaccgcatggcccgcccctactacctggaagggttccgcctgttggaagaacacgtggcgcgcgcgccgcagatcgaccgcgccctcaaggccggcgggcactttcgcatggggccgctcgagctgaccgattttatcggccaggacatcaactatcaggtcagccggcaaatctggcaggacatgcaatacgatccgcgctatacccccggccatctgcagcgttcgctggtcgatgccggtctgttggggaaaaagaacggccgctcctattttgccgccgaagaaaacgccttaccggtaacggccgccaccgatgcagacgtcgagacgctgcgcgtttacggcgaacaccctttttttaccctgttgcaacagcgggccgcgcttcagtggccacggctgcgcgtggagcaacggccggccttaccgggcctggggccggccgtccagatcaatgaggctttcaccgtcagcgtcaccgatggccgcacggcgagccagttggcggagcagacggcggcggatgcctttgtggtcgatgtcgccctgaattacgccgacacggcgtatctggtggcagcgcacaaccgccacgcctctgcggccaataaggcgctgtttttacgcctgctgcacacggcaatcccgcaggttgaatttatcaaggactccccggcgctgatcgtcgcccgcgtcctcagcagcctgatcaacgagtcggtgatcatggtggaaagcggcgtctgcagccgggaagacatcgatgtcgccgccgtcgccggcgttaactacgccgacggcattttcggctggctcgatagcctgggggagaaaaacgtcaggacgacgctgagcaacctggcgcagctgctgcacgcggcacgctatgcgccgcattacacccttctgcacgccgcgcaaccggcgctgacgaccacgccttaa

SEQ ID NO: 124 - DNA, 1530 bp, Serratia marcescens 99
atggcagaaagtaatgcggcaattcaatcggctgcgattatcggtgcgggaacgatgggcagaggcatcgcttatcttttcgcgcaaaaaggcattcgcacggtgctttataatcgcaacggcaataccctcaatcaggctcgcgaatatatcgcgcaagacctgaacaagaaagtcgaacagggcaagatcgcgctgcaggataaaggcgcagtgctggccaatctggtgttcacctcggtgtttgagactatcgccgacagcgatctggtgatagaaaccatcgccgagcaagagcaaaccaaacttgaggtgctggcggccatcgccgcggcggtcaagcccgacacgctgatcgccaccaatacctcctcactgtcgcttaacaagctggcaaccgcggtgacgcacagcgagcggtttatcggtttgcactttttcaatcccgcgccgctgatgaaactgattgaaatcatcccggcctactttaccgcacgcgccaccaccgaacgttgccgtcagctggtggccgcgttggggaaacgcgatgtcgtctgccaggccacgccggggtttatcgtcaaccgcatggcccgcccctactacctggaagggttccgcctgttggaagaacacgtggcgcgcgcgccgcagatcgaccgcgccctcaaggccggcgggcactttcgcatggggccgctcgagctgaccgattttatcggccaggacatcaactatcaggtcagccggcaaatctggcaggacatgcaatacgatccgcgctatacccccggccatctgcagcgttcgctggtcgatgccggtctgttggggaaaaagaacggccgctcctattttgccgccgaagaaaacgccttaccggtaacggccgcctccaatgcagacgtcgagacgctgcgcgtttacggcgaacaccctttttttaccctgttgcaacagcgggccgcgcttcagtggccacggctgcgcgtggagcaacggccggccttaccgggtctggggccggccgtccagatcaatgaggctttcaccgtcagcgtcaccgatggccgcacggcgagccaattggcggagctgacggcggcggatgcctttgtggtcgatgtcgccctgaactacgccgacacggcgtatctggtggcagcgcacaaccgccacgcctctgcggccaataaggcgctgtttttacgcctgctgcacacggcaatcccgcaggttgaatttatcaaggactccccggcgctgatcgtcgcccgcgtcctcagcagcctgatcaacgagtcggtgatcatggtggaaagcggcgtctgcagccgggaagacatcgatgtcgccgccgtcgccggcgttaactacgccgacggcattttcggctggctcgatagcctgggggagaaaaacgtcaggacgacgctgagcaacctggcgcagctgctgcacgcggcacgctatgcgccgcattacacccttctacacgccgcgcaaccggtgctgacgaccacgccttaa

SEQ ID NO: 125 - DNA, 1530 bp, Serratia marcescens 374
atggcagaaagtaatgcggcaattcaatcggctgcgattatcggcgcgggaacgatgggcagaggcatcgcttatcttttcgcgcaaaagggcattcgtacggtgctttataatcgcaacggcaataccctcaatcaggctcgcgaatatatcgcgcaagacctgaacaagaaagtcgaacagggcaagatcgcgctgcaggataaaagctcagtgctggccaatctggtgttctcgacggcgcttgtggctatcgccgacagcgagttggtgatagaaaccatcgccgagcatgaacaaaccaaacttgaggtgttggcggccatcgccgcggtggtcaagcccgatacgctgatcgccaccaatacctcctcactgtcgcttaacaagctggcaaccgcggtgacgcacagcgagcggtttatcggtttgcactttttcaaccctgcgccgctgatgaaactgattgaaatcatcccggcctactttaccgcacacgccaccacggaacgttgccgtcaactggtggccgcgttggggaaacgcgatgtcgtctgtcaggccacgccggggtttatcgtcaaccgcatggcccgcccctactacctggaagggttccgcctgttggaagagcacgtggcgcgcgcgccgcagatcgaccgtgccctcaaggccggcggacacttccgcatggggccgctcgagctgaccgattttatcggccaggacatcaactatcaggtcagccggcaaatctggcaggacatgcaatacgacccgcgctatacccccggccatctgcagcgttcgctggtcgatgccggtctgttggggaaaaagaacggccgctcctattttgccgccgaagaaaccgccccgccagtgacggccgccatcgatgcagacgtcgagacgctgcgcgtttacggcgaacaccctttttttaccctgttgcaacagcaagccgcacgtcagtggccacagctgcgcgtggaacaacggccggccttaccgagcctggggccggccgtccagatcaatggcgcattcaccgtcagcatcaccgatggccgcacggcgagccagttagccgagcagacgacggctgacgcttttgtgatcgacatcgccctgaactacgccgacacggcgtatctggttgcggcgcacaatcgctatgcctctgcggccaataaggcgctgtttttacgcctactgcacactgcgatcccgcaggttgaatttatcaaagactccccggcgctgatcgtcgctcgtgtcctcagcagcctgatcaatgagtcggtgatcatggtggaaagcggcgtttgcagccgggaagacattgatgtcgccgccgtcgcgggcgttaactacgccggcggcattttcgactggctcggcaaactgggggagaaaaacgtcaggacgacgctgagcaatctggcgcagctgctgcacgcagcgcgctatgcgccgcattacacccttctgcacgccgcgcaaccggcgctgacgaccacgccttga

SEQ ID NO: 126 - DNA, 1530 bp, Serratia marcescens 2880STDY5683036
atggcagaaagtaatgcggcaattcaatcggctgcgattatcggtgcgggaacgatgggcagaggcatcgcttatcttttcgcgcaaaaaggcattcgcacggtgctttataatcgcaacggcaataccctcaatcaggctcgcgaatatatcgcgcaagacctgaacaagaaagtcgaacagggcaagatcgcgctgcaggataaaggcgcagtgctggccaatctggtgttcacctcggtgtttgagactatcgccgacagcgatctggtgatagaaaccatcgccgagcaagagcaaaccaaacttgaggtgctggcggccatcgccgcggcggtcaagcccgacacgctgctcgccaccaatacctcctcactgtcgcttaacaagctggcaaccgcggtgacgcacagcgagcggtttatcggtttgcactttttcaatcccgcgccgctgatgaaactgattgaaatcatcccggcctactttaccgcacgcgccaccaccgaacgttgccgtcagctggtggccgcgttggggaaacgcgatgtcgtctgccaggccacgccggggtttatcgtcaaccgcatggcccgcccctactacctggaagggttccgcctgttggaagaacacgtggcgcgcgcgccgcagatcgaccgcgccctcaaggccggcgggcactttcgcatggggccgctcgagctgaccgattttatcggccaggacatcaactatcaggtcagccggcaaatctggcaggacatgcaatacgatccgcgctatacccccggccatctgcagcgttcgctggtcgatgccggtctgttggggaaaaagaacggccgctcctattttgccgccgaagaaaacgccttaccggtaacggccgcctccaatgcagacgtcgagacgctgcgcgtttacggcgaacaccctttttttaccctgttgcaacagcgggccgcgcttcagtggccacggctgcgcgtggagcaacggccggccttaccgggtctggggccggccgtccagatcaatgaggctttcaccgtcagcgtcaccgatggccgcacggcgagccaattggcggagctgacggcggcggatgcctttgtggtcgatgtcgccctgaactacgccgacacggcgtatctggtggcagcgcacaaccgccacgcctctgcggccaataaggcgctgtttttacgcctgctgcacacggcaatcccgcaggttgaatttatcaaggactccccggcgctgatcgtcgcccgcgtcctcagcagcctgatcaacgagtcggtgatcatggtggaaagcggcgtctgcagccgggaagacatcgatgtcgccgccgtcgccggcgttaactacgccgacggcattttcggctggctcgatagcctgggggagaaaaacgtcaggacgacgctgagcaacctggcgcagctgctgcacgcggcacgctatgcgccgcattacacccttctacacgccgcgcaaccggtgctgacgaccacgccttaa

SEQ ID NO: 127 - DNA, 1530 bp, Serratia marcescens 2880STDY5683034
atggcagaaagtaatgcggcaattcaatcggctgcgattatcggcgcgggaacgatgggcagaggcatcgcttatcttttcgcgcaaaaaggcattcgcacggtgctttataatcgcaacggcaataccctcaatcaggctcgcgaatatatcgcgcaagacctgaacaagaaagtcgaacagggcaagatcgcgctgcaggataaaggcgcagtgctggccaatctggtgttcacctcggtgtttgagactatcgccgacagcgagctggtgatagaaaccatcgccgagcaagagcaaaccaaacttgaggtgctggcggccatcgccgcggcggtcaagcccgacacgctgatcgccaccaatacctcctcactgtcgcttaacaagctggcaaccgcggtgacgcacagcgagcggtttatcggtttgcactttttcaatcccgcgccgctgatgaaactgattgaaatcatcccggcctactttaccgcacgcgccaccaccgaacgctgccgtcagttggtggccgcgttggggaaacgcgatgtcgtctgccaggccacgccggggtttatcgtcaaccgcatggcccgcccctactacctggaagggttccgcctgttggaagaacacgtggcgcgcgcgccgcagatcgaccgcgccctcaaggccggcgggcactttcgcatggggccgctcgagctgaccgattttatcggccaggacatcaactatcaggtcagccggcaaatctggcaggacatgcaatacgatccgcgctatacccccggccatctgcagcgttcgctggtcgatgccggtctgttggggaaaaagaacggccgctcctattttgccgccgaagaaaacgccttaccggtaacggccgccaccgatgcagacgtcgagacgctgcgcatttacggcgaacaccctttttttaccctgttgcaacagcgggccgcgcttcagtggccacggctgcgcgtggagcaacggccggccttaccgggcctggggccggccgtccagatcaatgaggctttcaccgtcagcgtcaccgatggccgcacggcgagccagttggcggagctgacggcggcggatgcctttgtggtcgatgtcgccctgaactacgccgacacggcgtatctggtggcagcgcacaaccgccacgcctctgcggccaataaggcgctgtttttacgcctgctgcacacggcaatcccgcaggttgaatttatcaaggactccccggcgctgatcgtcgcccgcgtcctcagcagcctgatcaacgagtcggtgatcatggtggaaagcggcgtctgcagccgggaagacatcgatgtcgccgccgtcgccggcgttaactacgccgacggcattttcggctggctcgataacctgggggagaaaaacgtcaggacgacgctgagcaacctggcgcagctgctgcacgcggcacgctatgcgccgcattacacccttctacacgccgcgcaaccggcgctgacgaccacgccttaa

SEQ ID NO: 128 - DNA, 1530 bp, Serratia marcescens 2880STDY5682892
atggcagaaagtaatgcggcaattcaatcggctgcgattatcggtgcgggaacgatgggcagaggcatcgcttatcttttcgcgcaaaaaggcattcgcacggtgctttataatcgcaacggcaataccctcaatcaggctcgcgaatatatcgcgcaagacctgaacaagaaagtcgaacagggcaagatcgcgctgcaggataaaggcgcagtgctggccaatctggtgttcacctcggtgtttgagactatcgccgacagcgatctggtgatagaaaccatcgccgagcaagagcaaaccaaacttgaggtgctggcggccatcgccgcggcggtcaagcccgacacgctgatcgccaccaatacctcctcactgtcgcttaacaagctggcaaccgcggtgacgcacagcgagcggtttatcggtttgcactttttcaatcccgcgccgctgatgaaactgattgaaatcatcccggcctactttaccgcacgcgccaccaccgaacgttgccgtcagctggtagccgcgttggggaaacgcgatgtcgtctgccaggccacgccggggtttatcgtcaaccgcatggcccgcccctactacctggaagggttccgcctgttggaagaacacgtggcgcgcgcgccgcagatcgaccgcgccctcaaggccggcgggcactttcgcatggggccgctcgagctgaccgattttatcggccaggacatcaactatcaggtcagccggcaaatctggcaggacatgcaatacgatccgcgctatacccccggccatctgcagcgttcgctggtcgatgccggtctgttggggaaaaagaacggccgctcctattttgccgccgaagaaaacgccttaccggtaacggccgccaccgatgcagacgtcgagacgctgcgcgtttacggcgaacaccctttttttaccctgttgcaacagcgggccgcgcttcagtggccacggctgcgcgtggagcaacggccggccttaccgggcctggggccggccgtccagatcaatgaggctttcaccgtcagcgtcaccgatggccgcacggcgagccagttggcggagctgacggcggcggatgcctttgtggtcgatgtcgccctgaactacgccgacacggcgtatctggtggcagcgcacaaccgccacgcctctgcggccaataaggcgctgtttttacgcctgctgcacacggcaatcccgcaggttgaatttatcaaggactccccggcgctgatcgtcgcccgcgtcctcagcagcctgatcaacgagtcggtgatcatggtggaaagcggcgtctgcagccgggaagacatcgatgtcgccgccgtcgccggcgttaactacgccgacggcattttcggctggctcgatagcctgggggagaaaaacgtcaggacgacgctgagcaacctggcgcagctgctgcacgcggcacgctatgcgccgcattacacccttctgcacgccgcgcaaccggcgctgacgaccacgccttaa

SEQ ID NO: 129 - DNA, 1530 bp, Serratia marcescens SM39
atggcagaaagtaatgcggcaattcaatcggctgcgattatcggcgcgggaacgatgggcagaggcatcgcttatcttttcgcgcaaaaaggcattcgcacggtgctttataatcgcaacggcaataccctcaatcaggctcgcgaatatatcgtgcaagacctgaacaagaaagtcgaacagggcaagatcgcgctgcaggataaaggcgcagtgctggccaatctggtgttcacctcggtgtttgagactatcgccgacagcgagctggtgatagaaaccatcgccgagcaagagcaaaccaaacttgaggtgctggcggccatcgccgcggcggtcaagcccgacacgctgatcgccaccaatacctcctcactgtcgcttaacaagctggcaaccgcggtgacgcacagcgagcggtttatcggtttgcactttttcaatcccgcgccgctgatgaaactgattgaaatcatcccggcctactttaccgcacgcgccaccaccgaacgttgccgtcagctggtggccgcgttggggaaacgcgatgtcgtctgccaggccacgccggggtttatcgtcaaccgcatggcccgcccctactacctggaagggttccgcctgttggaagaacacgtggcgcgcgcgccgcagatcgaccgcgccctcaaggccggcgggcactttcgcatggggccgctcgagctgaccgattttatcggccaggacatcaactatcaggtcagccggcaaatctggcaggacatgcaatacgatccgcgctatacccccggccatctgcagcgttcgctggtcgatgccggtctgttggggaaaaagaacggccgctcctattttgccgccgaagaaaacgccttaccggtaacggccgccaccgatgcagacgtcgagacgctgcgcatttacggcgaacaccctttttttaccctgttgcaacagcgggccgcgcttcagtggccacggctgcgcgtggagcaacggccggccttaccgggcctggggccggccgtccagatcaatgaggctttcaccgtcagcgtcaccgatggccgcacggcgagccagttggcggagctgacggcggcggatgcctttgtggtcgatgtcgccctgaactacgccgacacggcgtatctggtggcagcgcacaaccgccacgcctctgcggccaataaggcgctgtttttacgcctgctgcacacggcaatcccgcaggttgaatttatcaaggactccccggcgctgatcgtcgcccgcgtcctcagcagcctgatcaacgagtcggtgatcatggtggaaagcggcgtctgcagccgggaagacatcgatgtcgccgccgtcgccggcgttaactacgccgacggcattttcggctggctcgataacctgggggagaaaaacgtcaggacgacgctgagcaacctggcgcagctgctgcacgcggcacgctatgcgccgcattacacccttctacacgccgcgcaaccggcgctgacgaccacgccttaa

SEQ ID NO: 130 - DNA, 1530 bp, Serratia marcescens 189
atggcagaaagtaatgcggcaattcaatcggctgcgattatcggcgcgggaacgatgggcagaggcatcgcttatcttttcgcgcaaaaaggcattcgcacggtgctttataatcgcaacggcaataccctcaatcaggctcgcgaatatatcgcgcaagacctgaacaagaaagtcgaacagggcaagatcgcgctgcaggataaaggcgcagtgctggccaatctggtgttcacctcggtgtttgagactatcgccgacagcgatctggtgatagaaaccatcgccgagcaagagcaaaccaaacttgaggtgctggcggccatcgccgcggcggtcaagcccgacacgctgatcgccaccaatacctcctcactgtcgcttaacaagctggcaaccgcggtgacgcacagcgagcggtttatcggtttgcactttttcaatcccgcgccgctgatgaaactgattgaaatcatcccggcctactttaccgcacgcgccaccaccgaacgttgccgtcagctggtagccgcgttggggaaacgcgatgtcgtctgccaggccacgccggggtttatcgtcaaccgcatggcccgcccctactacctggaagggttccgcctgttggaagaacacgtggcgcgcgcgccgcagatcgaccgcgccctcaaggccggcgggcactttcgcatggggccgctcgagctgaccgattttatcggccaggacatcaactatcaggtcagccggcaaatctggcaggacatgcaatacgatccgcgctatacccccggccatctgcagcgttcgctggtcgatgccggtctgttggggaaaaagaacggccgctcctattttgccgccgaagaaaacgccttaccggtaacggccgccaccgatgcagacgtcgagacgctgcgcatttacggcgaacaccctttttttaccctgttgcaacagcgggccgcgcttcagtggccacggctgcgcgtggagcaacggccggccttaccgggcctggggccggccgtccagatcaatgaggctttcaccgtcagcgtcaccgatggccgcacggcgagccagttggcggagctgacggcggcggatgcctttgtggtcgatgtcgccctgaactacgccgacacggcgtatctggtggcagcgcacaaccgccacgcctctgcggccaataaggcgctgtttttacgcctgctgcacacggcaatcccgcaggttgaatttatcaaggactccccggcgctgatcgtcgcccgcgtcctcagcagcctgatcaacgagtcggtgatcatggtggaaagcggcgtctgcagccgggaagacatcgatgtcgccgccgtcgccggcgttaactacgccgacggcattttcggctggctcgataacctgggggagaaaaacgtcaggacgacgctgagcaacctggcgcagctgctgcacgcggcacgctatgcgccgcattacacccttctacacgccgcgcaaccggcgctgacgaccacgccttaa

SEQ ID NO: 131 - DNA, 1530 bp, Serratia marcescens SMB2099
atggcagaaagtaatgcggcaattcaatcggctgcgattatcggcgcgggaacgatgggcagaggcatcgcttatcttttcgcgcaaaaaggcattcgcacggtgctttataatcgcaacggcaataccctcaatcaggctcgcgaatatatcgcgcaagacctgaacaagaaagtcgaacagggcaagatcgcgctgcaggataaaggcgcagtgctggccaatctggtgttcacctcggtgtttgagactatcgccgacagcgatctggtgatagaaaccatcgccgagcaagagcaaaccaaacttgaggtgctggcggccatcgccgcggcggtcaagcccgacacgctgatcgccaccaatacctcctcactgtcgcttaacaagctggcaaccgcggtgacgcacagcgagcggtttatcggtttgcactttttcaatcccgcgccgctgatgaaactgattgaaatcatcccggcctactttaccgcacgcgccaccaccgaacgttgccgtcagctggtggccgcgttggggaaacgcgatgtcgtctgccaggccacgccggggtttatcgtcaaccgcatggcccgcccctactacctggaagggttccgcctgttggaagaacacgtggcgcgcgcgccgcagatcgaccgcgccctcaaggccggcgggcactttcgcatggggccgctcgagctgaccgattttatcggccaggacatcaactatcaggtcagccggcaaatctggcaggacatgcaatacgatccgcgctatacccccggccatctgcagcgttcgctggtcgatgccggtctgttggggaaaaagaacggccgctcctattttgccgccgaagaaaacgccttaccggtaacggccgccaccgatgcagacgtcgagacgctgcgcgtttacggcgaacaccctttttttaccctgttgcaacagcgggccgcgcttcagtggccacggctgcgcgtggagcaacggccggccttaccgggcctggggccggccgtccagatcaatgaggctttcaccgtcagcgtcaccgatggccgcacggcgagccagttggcggagctgacggcggcggatgcctttgtggtcgatgtcgccctgaactacgccgacacggcgtatctggtggcagcgcacaaccgccacgcctctgaggccaataaggcgctgtttttacgcctgctgcacacggcaatcccgcaggttgaatttatcaaggactccccggcgctgatcgtcgcccgcgtcctcagcagcctgatcaacgagtcggtgatcatggtggaaagcggcgtctgcagccgggaagacatcgatgtcgccgccgtcgccggcgttaactacgccgacggcattttcggctggctcgatagcctgggggagaaaaacgtcaggacgacgctgagcaacctggcgcagctgctgcacgcggcacgctatgcgccgcattacacccttctacacgccgcgcaaccggcgctgacgaccacgccttaa

SEQ ID NO: 132 - DNA, 1530 bp, Serratia marcescens 2880STDY5682862
atggcagaaagtaatgcggcaattcaatcggctgcgattatcggcgcgggaacgatgggcagaggcatcgcttatcttttcgcgcaaaaaggcattcgcacggtgctttataatcgcaacggcaataccctcaatcaggctcgcgaatatatcgtgcaagacctgaacaagaaagtcgaacagggcaagatcgcgctgcaggataaaggcgcagtgctggccaatctggtgttcacctcggtgtttgagaccattgccgacagcgagctggtgatagaaaccatcgccgagcaagagcaaaccaaacttgaggtgctggcggccatcgccgcggcggtcaagcccgacacgctgatcgccaccaatacctcctcactgtcgcttaacaagctggcaaccgcggtgacgcacagcgagcggtttatcggtttgcactttttcaatcccgcgccgctgatgaaactgattgaaatcatcccggcctactttaccgcacgcgccaccaccgaacgttgccgtcagctggtagccgcgttggggaaacgcgatgtcgtctgccaggccacgccggggtttatcgtcaaccgcatggcccgcccctactacctggaagggttccgcctgttggaagaacacgtggcgcgcgcgccgcagatcgaccgcgccctcaaggccggcgggcactttcgcatggggccgctcgagctgaccgattttatcggccaggacatcaactatcaggtcagccggcaaatctggcaggacatgcaatacgatccgcgctatacccccggccatctgcagcgttcgctggtcgatgccggtctgttggggaaaaagaacggccgctcctattttgccgccgaagaaaacgccttaccggtaacggccgccaccgatgcagacgtcgagacgctgcgcgtttacggcgaacaccctttttttaccctgttgcaacagcgggccgcgcttcagtggccacggctgcgcgtggagcaacggccggccttaccgggcctggggccggccgtccagatcaatgaggctttcaccgtcagcgtcaccgatggccgcacggcgagccagttggcggagctgacggcggcggatgcctttgtggtcgatgtcgccctgaactacgccgacacggcgtatctggtggcagcgcacaaccgccacgcctctgcggccaataaggcgctgtttttacgcctgctgcacacggcaatcccgcaggttgaatttatcaaggactccccggcgctgatcgtcgcccgcgtcctcagcagcctgatcaacgagtcggtgatcatggtggaaagcggcgtctgcagccgggaagacatcgatgtcgccgccgtcgctggcgttaactacgccgacggcattttcggctggctcgatagcctgggggagaaaaacgtcaggacgacgctgagcaacatggcgcagctgctgcacgcggcacgctatgcgccgcattacacccttctgcacgccgcgcaaccggcgctgatgaccacgccttaa

SEQ ID NO: 133 - DNA, 1530 bp, Serratia marcescens SE4145
atggcagaaagtaatgcggaaattcaatcggctgcgattatcggcgcgggaacgatgggcagaggcatcgcttatcttttcgcgcaaaaaggcattcgcacggtgctttataatcgcaacggcaataccctcaatcaggctcgcgaatatatcgtgcaagacctgaacaagaaagtcgaacagggcaagatcgcgctgcaggataaaggcgcagtgctggccaatctggtgttcacctcggtgtttgagactatcgccgacagcgagctggtgatagaaaccatcgccgagcaagagcaaaccaaacttgaggtgctggcggccatcgccgcggcggtcaagcccgacacgctgatcgccaccaatacctcctcactgtcgcttaacaagctggcaaccgcggtgacgcacagcgagcggtttatcggtttgcactttttcaatcccgcgccgctgatgaaactgattgaaatcatcccggcctactttaccgcacgcgccaccaccgaacgttgccgtcagctggtagccgcgttggggaaacgcgatgtcgtctgccaggccacgccggggtttatcgtcaaccgcatggcccgcccctactacctggaagggttccgcctgttggaagaacacgtggcgcgcgcgccgcagatcgaccgcgccctcaaggccggcgggcactttcgcatggggccgctcgagctgaccgattttatcggccaggacatcaactatcaggtcagccggcaaatctggcaggacatgcaatacgatccgcgctatacccccggccatctgcagcgttcgctggtcgatgccggtctgttggggaaaaagaacggccgctcctattttgccgccgaagaaaacgccttaccggtaacggccgccaccgatgcagacgtcgagacgctgcgcatttacggcgaacaccctttttttaccctgttgcaacagcgggccgcgcttcagtggccacggctgcgcgtggagcaacggccggccttaccgggcctggggccggccgtccagatcaatgaggctttcaccgtcagcgtcaccgatggccgcacggcgagccagttggcggagctgacggcggcggatgcctttgtggtcgatgtcgccctgaactacgccgacacggcgtatctggtggcagcgcacaaccgccacgcctctgcggccaataaggcgctgtttttacgcctgctgcacacggcaatcccgcaggttgaatttatcaaggactccccggcgctgatcgtcgcccgcgtcctcagcagcctgatcaacgagtcggtgatcatggtggaaagcggcgtctgcagccgggaagacatcgatgtcgccgccgtcgccggcgttaactacgccgacggcattttcggctggctcgataacctgggggagaaaaacgtcaggacgacgctgagcaacctggcgcagctgctgcacgcggcacgctatgcgccgcattacacccttctacacgccgcgcaaccggcgctgacgaccacgccttaa

SEQ ID NO: 134 - DNA, 1530 bp, Serratia marcescens 2880STDY5682876
atggcagaaagtaatgcggcaattcaatcggctgcgattatcggtgcgggaacgatgggcagaggcatcgcttatcttttcgcgcaaaaaggcattcgcacggtgctttataatcgcaacggcaataccctcaatcaggctcgcgaatatatcgcgcaagacctgaacaagaaagtcgaacagggcaagatcgcgctgcagggtaaaggcgcagtgctggccaatctggtgttcacctcggtgtttgagactatcgccgacagcgatctggtgatagaaaccatcgccgagcaagagcaaaccaaacttgaggtgctggcggccatcgccgcggcggtcaagcccgacacgctgatcgccaccaatacctcctcactgtcgcttaacaagctggcaaccgcggtgacgcacagcgagcggtttatcggtttgcactttttcaatcccgcgccgctgatgaaactgattgaaatcatcccggcctactttaccgcacgcgccaccaccgaacgttgccgtcagctggtagccgcgttggggaaacgcgatgtcgtctgccaggccacgccggggtttatcgtcaaccgcatggcccgcccctactacctggaagggttccgcctgttggaagaacacgtggcgcgcgcgccgcagatcgaccgcgccctcaaggccggcgggcactttcgcatggggccgctcgagctgaccgattttatcggccaggacatcaactatcaggtcagccggcaaatctggcaggacatgcaatacgatccgcgctatacccccggccatctgcagcgttcgctggtcgatgccggtctgttggggaaaaagaacggccgctcctattttgccgccgaagaaaacgccttaccggtaacggccgccaccgatgcagacgtcgagacgctgcgcgtttacggcgaacaccctttttttaccctgttgcaacagcgggccgcgcttcagtggccacggctgcgcgtggagcaacggccggccttaccgggcctggggccggccgtccagatcaatgaggctttcaccgtcagcgtcaccgatggccgcacggcgagccagttggcggagctgacggcggcggatgcctttgtggtcgatgtcgccctgaactacgccgacacggcgtatctggtggcagcgcacaaccgccacgcctctgcggccaataaggcgctgtttttacgcctgctgcacacggcaatcccgcaggttgaatttatcaaggactccccggcgctgatcgtcgcccgcgtcctcagcagcctgatcaacgagtcggtgatcatggtggaaagcggcgtctgcagccgggaagacatcgatgtcgccgccgtcgccggcgttaactacgccgacggcattttcggctggctcgatagcctgggggagaaaaacgtcaggacgacgctgagcaacctggcgcagctgctgcacgcggcacgctatgcgccgcattacacccttctgcacgccgcgcaaccggcgctgacgaccacgccttaa

SEQ ID NO: 135 - DNA, 1530 bp, Serratia marcescens 709
atggcagaaagtaatgcggcaattcaatcggctgcgattatcggcgcgggaacgatgggcagaggcatcgcttatcttttcgcgcaaaaaggcattcgcacggtgctttataatcgcaacggcaataccctcaatcaggctcgcgaatatatcgcgcaagacctgaacaagaaagtcgaacagggcaagatcgcgctgcaggataaaggcgcagtgctggccaatctggtgttcacctcggtgtttgagactatcgccgacagcgatctggtgatagaaaccatcgccgagcaagagcaaaccaaacttgaggtgctggcggccatcgccgcggcggtcaagcccgacacgctgatcgccaccaatacctcctcactgtcgcttaacaagctggcaaccgcggtgacgcacagcgagcggtttatcggtttgcactttttcaatcccgcgccgctgatgaaactgattgaaatcatcccggcctactttaccgcacgcgccaccaccgaacgttgccgtcagctggtagccgcgttggggaaacgcgatgtcgtctgccaggccacgccggggtttatcgtcaaccgcatggcccgcccctactacctggaagggttccgcctgttggaagaacacgtggcgcgcgcgccgcagatcgaccgcgccctcaaggccggcgggcactttcgcatggggccgctcgagctgaccgattttatcggccaggacatcaactatcaggtcagtcggcaaatctggcaggacatgcaatacgatccgcgctatacccccggccatctgcagcgttcgctggtcgatgccggtctgttggggaaaaagaacggccgctcctattttgccgccgaagaaaacgccttaccggtaacggccgccaccgatgcagacgtcgagacgctgcgcgtttacgacgaacaccctttttttaccctgttgcaacagcgggccgcgcttcagtggccacggctgcgcgtggagcaacggccggccttaccgggcctggggccggccgtccagatcaatgaggctttcaccgtcagcgtcaccgatggccgcacggcgagccagttggcggagctgacggcggcggatgcctttgtggtcgatgtcgccctgaactacgccgacacggcgtatctggtggcagcgcacaaccgccacgcctctgcggccaataaggcgctgtttttacgcctgctgcacacggcaatcccgcaggttgaatttatcaaggactccccggcgctgatcgtcgcccgcgtcctcagcagcctgatcaacgagtcggtgatcatggtggaaagcggcgtctgcagccgggaagacatcgatgtcgccgccgtcgccggcgttaactacgccgacggcattttcggctggctcgatagcctgggggagaaaaacgtcaggacgacgctgagcaacctggcgcagctgctgcacgcggcacgctatgcgccgcattacacccttctgcacgccgcgcaaccggcgctgacgaccacgccttaa

SEQ ID NO: 136 - DNA, 1530 bp, Serratia marcescens MGH136
atggcagaaagtaatgcggcaattcaatcggctgcgattatcggcgcgggaacgatgggcagaggcatcgcttatcttttcgcgcaaaaaggcattcgcacggtgctttataatcgcaacggcaataccctcaatcaggctcgcgaatatatcgcgcaagacctgaacaagaaagtcgaacaggacaagatcgcgctgcaggataaaggcgcagtgctggccaatctggtgttcacctcggtgtttgagactatcgccgacagcgatctggtgatagaaaccatcgccgagcaagagcaaaccaaacttgaggtgctggcggccatcgccgcggcggttaagcccgacacgctgatcgccaccaatacctcctcactgtcgcttaacaagctggcaaccgcggtgacgcacagcgagcggtttatcggtttgcactttttcaatcccgcgccgctgatgaaactgattgaaatcatcccggcctactttaccgcacgcgtcaccaccgaacgttgccgtcagctggtggccgcgttggggaaacgcgatgtcgtctgccaggccacgccggggtttatcgtcaaccgcatggcccgcccctactacctggaagggttccgtctgttagaagaacacgtggcgcgcgcgccgcagatcgaccgcgccctcaaggccggcgggcactttcgcatggggccgctcgagctgaccgattttatcggccaggacatcaactatcaggtcagccggcaaatctggcaggacatgcaatacgatccgcgctatacccccggccatctgcagcgttcgctggtcgatgccggtctgttggggaaaaagaacggccgctcctattttgccgccgaagaaaacgccttaccggtaacggccgccaccgatgcagacgtcgagacgctgcgcgtttacggcgaacaccctttttttaccctgttgcaacagcgggccgcgcttcagtggccacggctgcgcgtggagcaacggccggccttaccgggcctggggccggccgtccagatcaatgaggctttcaccgtcagcgtcaccgatggccgcacggcgagccagttggcggagctgacggcggcggatgcctttgtggtcgatgtcgccctgaactacgccgacacggcgtatctggtggcagcgcacaaccgccacgcctctgcggccaataaggcgctgtttttacgcctgctgcacacggcaatcccgcaggttgaatttatcaaggactccccggcgctgatcgtcgcccgcgtcctcagcagcctgatcaacgagtcggtgatcatggtggaaagcggcgtctgcagccgggaagacatcgatgtcgccgctgtcgccggcgttaactacgccgacggcattttcggctggctcgatagcctgggggagaaaaacgtcagaacgacgctgagcaacctggcgcagctgctgcacgcggcacgctatgcgccgcattacacccttctgcacgccgcgcaaccggcgctgacgaccacgccttaa

SEQ ID NO: 137 - DNA, 1530 bp, Serratia marcescens 2880STDY5682884
atggcagaaagtaatgcggcaattcaatcggctgcgattatcggcgcgggaacgatgggcagaggcatcgcttatcttttcgcgcaaaaaggcattcgcacggtgctttataatcgcaacggcaataccctcaatcaggctcgcgaatatatcgcgcaagacctgaacaagaaagtcgaacagggcaagatcgcgctgcaggataaaggcgcagtgctggccaatctggtgttcacctcggtgtttgagactatcgccgacagcgagctggtgatagaaaccatcgccgagcaagagcaaaccaaacttgaggtgctggcggccatcgccgcggcggtcaagcccgacacgctgatcgccaccaatacctcctcactgtcgcttaacaagctggcaaccgcggtgacgcacagcgagcggtttatcggtttgcactttttcaatcccgcgccgctgatgaaactgattgaaatcatcccggcctactttaccgcacgcgccaccaccgaacgctgccgtcagttggtggccgcgttggggaaacgcgatgtcgtctgccaggccacgccggggtttatcgtcaaccgcatggcccgcccctactacctggaagggttccgcctgttggaagaacacgtggcgcgcgcgccgcagatcgaccgcgccctcaaggccggcgggcactttcgcatggggccgctcgagctgaccgattttatcggccaggacatcaactatcaggtcagccggcaaatctggcaggacatgcaatacgatccgcgctatacccccggccatctgcagcgttcgctggtcgatgccggtctgttggggaaaaagaacggccgctcctattttgccgccgaagaaaacgccttaccggtaacggccgccaccgatgcagacgtcgagacgctgcgcatttacggcgaacaccctttttttaccctgttgcaacagcgggccacgcttcagtggccacggctgcgcgtggagcaacggccggccttaccgggcctggggccggccgtccagatcaatgaggctttcaccgtcagcgtcaccgatggccgcacggcgagccagttggcggagctgatggcggcggatgcctttgtggtcgatgtcgccctgaactacgccgacacggcgtatctggtggcagcgcacaaccgccacgcctctgcggccaataaggcgctgtttttacgcctgctgcacacggcaatcccgcaggttgaatttatcaaggactccccggcgctgatcgtcgcccgcgtcctcagcagcctgatcaacgagtcggtgatcatggtggaaagcggcgtctgcagtcgggaagacatcgatgtcgccgccgtcgccggcgttaactacgccgacggcattttcggctggctcgatagcctgggggagaaaaacgtcaggatgacgctgagcaacctggcgcagctgctgcacgcggcacgctatgcgccgcattacacccttctacacgccgcgcaaccggcgctgacgaccacgccttaa

SEQ ID NO: 138 - DNA, 1530 bp, Serratia marcescens D-3
atggcagaaagtaatgcggcaattcaatcggctgcgattatcggcgcgggaacgatgggcagaggcatcgcttatcttttcgcgcaaaaaggcattcgcacggtgctttataatcgcaacggcaataccctcaatcaggctcgcgaatatatcgcgcaagacctgaacaagaaagtcgaacagggcaagatcgcgctgcaggataaaggcgcagtgctggccaatctggtgttcacctcggtgtttgagactatcgccgacagcgatctggtgatagaaaccatcgccgagcaagagcaaaccaaacttgaggtgctggcggccatcgccgcggcggtcaagcccgacacgctgatcgccaccaatacctcctcactgtcgcttaacaagctggcaaccgcggtgacgcacagcgagcggtttatcggtttgcactttttcaatcccgcgccgctgatgaaactgattgaaatcatcccggcctactttaccgcacgcgccaccaccgaacgttgccgtcagctggtggccgcgttggggaaacgcgatgtcgtctgccaggccacgccggggtttatcgtcaaccgcatggcccgcccctactacctggaagggttccgcctgttggaagaacacgtggcgcgcgcgccgcagatcgaccgcgccctcaaggccggcgggcactttcgcatggggccgctcgagctgaccgattttatcggccaggacatcaactatcaggtcagccggcaaatctggcaggacatgcaatacgatccgcgctatacccccggccatctgcagcgttcgctggtcgatgccggtctgttggggaaaaagaacggccgctcctattttgccgccgaagaaaacgccttaccggtaacggccgccatcgatgcagacgtcgagacgctgcgcgtttacggcgaacaccctttttttaccctgttgcaacagcgggccgcgcttcagtggccacggctgcgcgtggagcaacggccggccttaccgggcctggggccggccgtccagatcaatgaggctttcaccgtcagcgtcaccgatggccgcacggcgagccagttggcggagctgacggcggcggatgcctttgtggtcgatgtcgccctgaactacgccgacacggcgtatctggtggcagcgcacaaccgccacgcctctgcggccaataaggcgctgtttttacgcctgctgcacacggcaatcccgcaggttgaatttatcaaggactccccggcgctgatcgtcgcccgcgtcctcagcagcctgatcaacgagtcggtgatcatggtggaaagcggcgtctgcagccgggaagacatcgatgtcgccgccgtcgccggcgttaactacgccgacggcattttcggcttgctcgatagcctgggggagaaaaacgtcaggacgacgctgagcaacctggcgcagctgctgcacgcggcacgctatgcgccgcattacacccttctacacgccgcgcaaccggcgctgacgaccacgccttaa

SEQ ID NO: 139 - DNA, 1530 bp, Serratia marcescens 2880STDY5682957
atggcagaaagtaatgcggcaattcaatcggctgcgattatcggcgcgggaacgatgggcagaggcatcgcttatcttttcgcacaaaaaggcattcgcacggtgctttataatcgcaacggcaataccctcaatcaggctcgcgaatatatcgagctagacctgaacaagaaagtcgaacagggcaagatcgcgctgcaggataaaggcgcggtgctggccaatctggtgttcacctcggcgtttgagaccattgccgacagcgagctggtgatagaaaccatcgccgagcaagagcaaaccaaacttgaggtgctggcggccatcgccgcggcggtcaagcccgacacgctgatcgccaccaatacctcctcactgtcgcttaacaagctggcaaccgcggtgacgcacagcgagcggtttatcggtttgcactttttcaatcccgcgccgctgatgaaactgattgaaatcatcccggcctactttaccgcacgcgccaccaccgaacgttgccgtcagctggtagccgcgttggggaaacgcgatgtcgtctgccaggccacgccggggtttatcgtcaaccgcatggcccgcccctactacctggaagggttccgcctgttggaagaacacgtggcgcgcgcgccgcagatcgaccgcgccctcaaggccggcgggcactttcgcatggggccgctcgagctgaccgattttatcggccaggacatcaactatcaggtcagccggcaaatctggcaggacatgcaatacgatccgcgctatacccccggccatctgcagcgttcgctggtcgatgccggtctgttggggaaaaagaacggccgctcctattttgccgccgaagaaaacgccttaccggtaacggccgccaccgatgcagacgtcgagacgctgcgcgtttacggcgaacaccctttttttaccctgttgcaacagcgggccgcgcttcagtggccacggctgcgcgtggagcaacggccggccttaccgggcctggggccggccgtccagatcaatgaggctttcaccgtcagcgtcaccgatggccgcacggcgagccagttggcggagctgacggcggcggatgcctttgtggtcgatgtcgccctgaactacgccgacacggcgtatctggtggcagcgcacaaccgccacgcctctgcggccaataaggcgctgtttttacgcctgctgcacacggcaatcccgcaggttgaatttatcaaggactccccggcgctgatcgtcgcccgcgtcctcagcagcctgatcaacgagtcggtgatcatggtggaaagcggcgtctgcagccgggaagacatcgatgtcgccgccgtcgccggcgttaactacgccgacggtattttcggctggctcgatagcctgggggagaaaaacgtcaggacgacgctgagcaacctggcgcagctgctgcacgcggcacgctatgcgccgcattacacccttctacacgccgcgcaaccggcgctgacgaccacgccttaa

SEQ ID NO: 140 - DNA, 1530 bp, Serratia marcescens YDC563
atggcagaaagtaatgcagcaattcagtcggctgcgattatcggcgcgggaacgatgggcagaggcatcgcttatcttttcgcacaaaaaggcattcgcacggtgctttataatcgcaacggcaataccctcaatcaggctcgcgaatatatcgagctagacctgaacaagaaagtcgaacagggcaagatcgcgctgcaggataaaggcgcggtgctggccaatctggtgttcacctcggcgtttgagaccattgccgacagcgagctggtgatagaaaccatcgccgagcaagagcaaaccaaacttgaggtgctggcggccatcgccgcggcggtcaagcccgacacgctgatcgccaccaatacctcctcactgtcgcttaacaagctggcaaccgcggtgacgcacagcgagcggtttatcggtttgcactttttcaatcccgcgccgctgatgaaactgattgaaatcatcccggcctactttaccgcacgcgccaccaccgaacgttgccgtcagctggtagccgcgttggggaaacgcgatgtcgtctgccaggccacgccggggtttatcgtcaaccgcatggcccgcccctactacctggaagggttccgcctgttggaagaacacgtggcgcgcgcgccgcagatcgaccgcgccctcaaggccggcgggcactttcgcatggggccgctcgagctgaccgattttatcggccaggacatcaactatcaggtcagccggcaaatctggcaggacatgcaatacgatccgcgctatacccccggccatctgcagcgttcgctggtcgatgccggtctgttggggaaaaagaacggccgctcctattttgccgccgaagaaaacgccttaccggtaacggccgccaccgatgcagacgtcgagacgctgcgcgtttacggcgaacaccctttttttaccctgttgcaacagcgggccgcgcttcagtggccacggctgcgcgtggagcaacggccggccttaccgggcctggggccggccgtccagatcaatgaggctttcaccgtcagcgtcaccgatggccgcacggcgagccagttggcggagcagacggcggcggatgcctttgtggtcgatgtcgccctgaattacgccgacacggcgtatctggtggcagcgcacaaccgccacgcctctgcggccaataaggcgctgtttttacgcctgctgcacacggcaatcccgcaggttgaatttatcaaggactccccggcgctgatcgtcgcccgcgtcctcagcagcctgatcaacgagtcggtgatcatggtggaaagcggcgtctgcagccgggaagacatcgatgtcgccgccgtcgctggcgttaactacgccgacggcattttcggctggctcgatagcctgggggagaaaaacgtcaggacgacgctgagcaacatggcgcagctgctgcacgcggcacgctatgcgccgcattacacccttctgcacgccgcgcaaccggcgctgatgaccacgccttaa

SEQ ID NO: 141 - DNA, 1530 bp, Serratia marcescens 2880STDY5683035
atggcagaaagtaatgcggcaattcaatcggctgcgattatcggcgcgggaacgatgggcagaggcatcgcttatcttttcgcgcaaaaaggcattcgcacggtgctttataatcgcaacggcaataccctcaatcaggctcgcgaatatatcgcgcaagacctgaacaagaaagtcgaacagggcaagatcgcgctgcaggataaaggcgcagtgctggccaatctggtgttcacctcggtgtttgagactatcgccgacagcgatctggtgatagaaaccatcgccgagcaagagcaaaccaaacttgaggtgctggcggccatcgccgcggcggtcaagcccgacacgctgatcgccaccaatacctcctcactgtcgcttaacaagctggcaaccgcggtgacgcacagcgagcggtttatcggtttgcactttttcaatcccgcgccgctgatgaaactgattgaaatcatcccggcctactttaccgcacgcgccaccaccgaacgttgccgtcagctggtggccgcgttggggaaacgcgatgtcgtctgccaggccacgccggggtttatcgtcaaccgcatggcccgcccctactacctggaagggttccgcctgttggaagaacacgtggcgcgcgcgccgcagatcgaccgcgccctcaaggccggcgggcactttcgcatggggccgctcgagctgaccgattttatcggccaggacatcaactatcaggtcagccggcaaatctggcaggacatgcaatacgatccgcgctatacccccggccatctgcagcgttcgctggtcgatgccggtctgttggggaaaaagaacggccgctcctattttgccgccgaagaaaacgccttaccggtaacggccgccatcgatgcagacgtcgagacgctgcgcgtttacggcgaacaccctttttttaccctgttgcaacagcgggccgcgcttcagtggccacggctgcgcgtggagcaacggccggccttaccgggcctggggccggccgtccagatcaatgaggctttcaccgtcagcgtcaccgatggccgcacggcgagccagttggcggagctgacggcggcggatgtctttgtggtcgatgtcgccctgaactacgccgacacggcgtatctggtggcagcgcacaaccgccacgcctctgcggccaataaggcgctgtttttacgcctgctgcacacggcaatcccgcaggttgaatttatcaaggactccccggcgctgatcgtcgcccgcgtcctcagcagcctgatcaacgagtcggtgatcatggtggaaagcggcgtctgcagccgggaagacatcgatgtcgccgccgtcgccggcgttaactacgccgacggcattttcggcttgctcgatagcctgggggagaaaaacgtcaggacgacgctgagcaacctggcgcagctgctgcacgcggcacgctatgcgccgcattacacccttctacacgccgcgcaaccggcgctgacgaccacgccttaa

SEQ ID NO: 142 - DNA, 1530 bp, Serratia marcescens 2880STDY5682930
atggcagaaagtaatgcggcaattcaatcggctgcgattatcggcgcgggaacgatgggcagaggcatcgcttatcttttcgcgcaaaaaggcattcgcacggtgctttataatcgcaacggcaataccctcaatcaggctcgcgaatatatcgcgcaagacctgaacaagaaagtcgaacagggcaagatcgcgctgcaggataaaggcgcagtgctggccaatctggtgttcacctcggtgtttgagactatcgccgacagcgatctggtgatagaaaccatcgccgagcaagagcaaaccaaacttgaggtgctggcggccatcgccgcggcggtcaagcccgacacgctgatcgccaccaatacatcctcactgtcgcttaacaagctggcaaccgcggtgacgcacagcgagcggtttatcggtttgcactttttcaatcccgcgccgctgatgaaactgattgaaatcatcccggcctactttaccgcacgcgccaccaccgaacgttgccgtcagctggtggccgcgttggggaaacgcgatgtcgtctgccaggccacgccggggtttatcgtcaaccgcatggcccgcccctactacctggaagggttccgcctgttggaagaacacgtggcgcgcgcgccgcagatcgaccgcgccctcaaggccggcgggcactttcgcatggggccgctcgagctgaccgattttatcggccaggacatcaactatcaggtcagccggcaaatctggcaggacatgcaatacgatccgcgctatacccccggccatctgcagcgttcgctggtcgatgccggtctgttggggaaaaagaacggccgctcctattttgccgccgaagaaaacgccttaccggtaacggccgccaccgatgcagacgtcgagacgctgcgcgtttacggcgaacaccctttttttaccctgttgcaacagcgggccgcgcttcagtggccacggctgcgcgtggagcaacggccggccttaccgggcctggggccggccgtccagatcaatgaggctttcaccgtcagcgtcaccgatggccgcacggcgagccagttggcggagctgacggcggcggatgcctttgtggtcgatgtcgccctgaactacgccgacacggcgtatctggtggcagcgcacaaccgccacgcctctgcggccaataaggcgctgtttttacgcctgctgcacacggcaatcccgcaggttgaatttatcaaggactccccggcgctgatcgtcgcccgcgtcctcagcagcctgatcaacgagtcggtgatcatggtggaaagcggcgtctgcagccgggaagacatcaatgtcgccgccgtcgccggcgttaactacgccgacggcattttcggcttgctcgatagcctgggggagaaaaacgtcaggacgacgctgagcaacctggcgcagctgctgcacgcggcacgctatgcgccgcattacacccttctacacgccgcgcaaccggtgctgacgaccacgccttaa

SEQ ID NO: 143 - DNA, 1530 bp, Serratia marcescens 790
atggcagaaagtaatgcggcaattcaatcggctgcgattatcggcgcgggaacgatgggcagaggcatcgcttatcttttcgcgcaaaaaggcattcgcacggtgctttataatcgcaacggcaataccctcaatcaggctcgcgaatatatcgcgcaagacctgaacaagaaagtcgaacagggcaagatcgcgctgcgggataaaggtgcagtgctagccaatctggtgttcacctcggtgtttgagactatcgccgacagcgagctggtgatagaaaccatcgccgagcaagagcaaaccaaacttgaggtgctggcggccatcgccgcggcggtcaagcccgacacgctgatcgccaccaatacctcctcactgtcgcttaacaagctggcaaccgcggtgacgcacagcgagcggtttatcggtttgcactttttcaatcccgcgccgctgatgaaactgattgaaatcatcccggcctactttaccgcacgcgccaccaccgaacgttgccgtcagctggtagccgcgttggggaaacgcgatgtcgtctgccaggccacgccggggtttatcgtcaaccgcatggcccgcccctactacctggaagggttccgcctgttggaagaacacgtggcgcgcgcgccgcagatcgaccgcgccctcaaggccggcgggcactttcgcatggggccgctcgagctgaccgattttatcggccaggacatcaactatcaggtcagccggcaaatctggcaggacatgcaatacgatccgcgctatacccccggccatctgcagcgttcgctggtcgatgccggtctgttggggaaaaagaacggccgctcctattttgccgccgaagaaaacgccttaccggtaacggccgccaccgatgcagacgtcgagacgctgcgcgtttacggcgaacaccctttttttaccctgttgcaacagcgggccgcgcttcagtggccacggctgcgcgtggagcaacggccggccttaccgggcctggggccggccgtccagaccaatgaggctttcaccgtcagcgtcaccgatggccgcacggcgaaccagttggcggagctgacggcggcggatgcctttgtggtcgatgtcgccctgaactacgccgacacggcgtatctggtggcagcgcacaaccgccacgcctctgcggccaataaggcgctgtttttacgcctgctgcacacggcaatcccgcaggttgaatttatcaaggactccccggcgctgatcgtcgcccgcgtcctcagcagcctgatcaacgagtcggtgatcatggtggaaagcggcgtctgcagccgggaagacatcgatgtcgccgccgtcgctggcgttaactacgccgacggcattttcggctggctcgatagcctgggggagaaaaacgtcaggacgacgctgagcaacatggcgcagctgctgcacgcggcacgctatgcgccgcattacacccttctgcacgccgcgcaaccggcgctgatgaccacgccttaa

SEQ ID NO: 144 - DNA, 1530 bp, Serratia marcescens UMH5
atggcagaaagtaatgcggcaattcagtcggctgcgattatcggcgcgggaacgatgggcagaggcatcgcttatcttttcgcgcaaaaaggcattcgcacggtgctttataatcgcaacggcaataccctcagtcaggctcgcgactatatcgagctagacctgaacaagaaagtcgaacagggcaagatcgcgctgcaggataaaggcgcggtgttggccaatctggtgttcacctcggtatttgagaccattgccgacagcgagctggtgatagaaaccatcgccgagcaagagcaaaccaaacttgaggtgctggcgaccatcgccgctgcagtcaagcccgacacgctgatcgccaccaatacctcctcactgtcgctaaataagctggcaaccgcggtgacgcacagcgagcggtttatcggtttgcactttttcaaccccgcgccgctgatgaaactgattgaaatcatcccggcctactgtaccgcacacgccaccacggagcgttgccgccagctggtggccgcgttggggaaacgtgacgtcgtctgccaggccacgccggggtttatcgtcaaccgcatggcccgcccctactacctggaagggttccgcctattggaagaacacgtggcgcgcgcgccgcagatcgaccgtgccctcaaggccggtgggcactttcgtatggggccactcgaactgaccgattttatcggccaggacatcaactatcaggtcagtcggcaaatctggcaggacatgcaatacgacgcgcgctatacccccggccacctgcagcgttcgctggtcgatgccggtctattgggaaaaaagaacggccgctcctattttgccgtcgaagaaaacgccccgccggtgatggccgccaccgatgcagacattgagacgctgcacgtttacggcgaacaccctttttttaccctgttacaacagcgggccgcgcttcagtggccacggctgcgcgtggaacaacggcaggcattaccgggcctggggccggccgtccggatcaatgacgctttcaccatcagcatcaccgatggccgcacggcaaaccagctggccgagcagacggcggcggatgcctttgtggtcgatgttgccctgaattacgccgacacggcgtatctggtggcagcgcacagccgccacgcctctggggccaataaagcgctgttcttacgcctgctgcacacggcaatcccgcaggttgaatttatcaaggattccccggccttgatcgtcgcccgcgtcctcagcagcctaatcaacgagtcggtgatcatggtggaaagcggcgtctgcagccgggaagacatcgatgtcgccgccgtcgccggcgttaactacgccgacggcattttcggctggctcgatagcctgggggagaaaaacgtcaggacgacgctgagcaacctggcgcagttgctgcacgcggcgcgctatgcgccgcattacacccttctgcacgccgcgcaaccggcgctgacgaccacgccttaa

SEQ ID NO: 145 - DNA, 1530 bp, Serratia marcescens 2880STDY5682988
atggcagaaagtaatgcggcaattcagtcggctgcgattatcggcgcgggaacgatgggcagaggcatcgcttatcttttcgcgcaaaaaggcattcgcacggtgctttataatcgcaacggcaataccctcagtcaggctcgcgactatatcgagctagacctgaacaagaaagtcgaacagggcaagatcgcgctgcaggataaaggcgcggtgttggccaatctggtgttcacctcggtatttgagaccattgccgacagcgagctggtgatagaaaccatcgccgagcaagagcaaaccaaacttgaggtgctggcgaccatcgccgctgcagtcaagcccgacacgctgatcgccaccaatacctcctcactgtcgctaaataagctggcaaccgcggtgacgcacagcgagcggtttatcggtttgcactttttcaaccccgcgccgctgatgaaactgattgaaatcatcccggcctactgtaccgcacacgccaccacggagcgttgccgccagctggtggccgcgttggggaaacgtgacgtcgtctgccaggccacgccggggtttatcgtcaaccgcatggcccgcccctactacctggaagggttccgcctattggaagaacacgtggcgcgcgcgccgcagatcgaccgtgccctcaaggccggtgggcactttcgtatggggccactcgaactgaccgattttatcggccaggacatcaactatcaggtcagtcggcaaatctggcaggacatgcaatacgacgcgcgctatacccccggccacctgcagcgttcgctggtcgatgccggtctattgggaaaaaagaacggccgctcctattttgccgtcgaagaaaacgccccgccggtgatggccgccaccgatgcagacattgagacgctgcacgtttacggcgaacaccctttttttaccctgttacaacagcgggccgcgcttcagtggccacggctgcgcgtggaacaacggcaggcattaccgggcctggggccggccgtccggatcaatgacgctttcaccatcagcatcaccgatggccgcacggcaaaccagctggccgagcagacggcgacggatgcctttgtggtcgatgttgccctgaattacgccgacacggcgtatctggtggcagcgcacagccgccacgcctctggggccaataaagcgctgttcttacgcctgctgcacacggcaatcccgcaggttgaatttatcaaggattccccggccttgatcgtcgcccgcgtcctcagcagcctaatcaacgagtcggtgatcatggtggaaagcggcgtctgcagccgggaagacatcgatgtcgccgccgtcgccggcgttaactacgccgacggcattttcggctggctcgatagcctgggggagaaaaacgtcaggacgacgctgagcaacctggcgcagttgctgcacgcggcgcgctatgcgccgcattacacccttctgcacgccgcgcaaccggcgctgacgaccacgccttaa

SEQ ID NO: 146 - DNA, 1530 bp, Serratia marcescens 945154301
atggcagaaagtaatgcggcaattcagtcggctgcgattatcggcgcgggaacgatgggcagaggcatcgcttatcttttcgcgcaaaaaggcattcgcacggtgctttataatcgcaacggcaataccctcaatcaggctcgcgactatatcgagctagacctgaacaagaaagtcgaacagggcaagatcgcgctgcaggataaaggcgcggtgttggccaatctggtgttcacctcggtatttgagaccattgccgacagcgagctggtgatagaaaccatcgccgagcaagagcaaaccaaacttgaggtgctggcggccatagccgcggcagtcaagcccgacacgctgatcgccaccaatacctcctcactgtcgctgaataagctggcaaccgcggtgacgcacagcgagcggtttatcggtttgcacttttttaaccccgcgccgctgatgaaactgattgaaatcatcccggcctactttaccgcacacgccaccacggagcgttgccgtcaactggtggccgcgttggggaaacgcgatgttgtctgccaggccacgccggggtttatcgtcaaccgcatggcccgcccctactacctggaagggttccgcctattggaagaacacgtggcgcgcgcgccgcagatcgaccgtgccctcaaggctggcgggcactttcgtatggggccgctcgagctgaccgattttatcggccaggacatcaactatcaggtcagtcggcaaatctggcaggacatgcaatacgacgcgcgctatacccccggccacctgcagcgttcgctggtcgatgccggtctattgggaaaaaagaacggccgctcctattttgccgccgaagaaaacgccccgccggtgatggccgccaccgatgcagacattgagacgctgcacgtttacggcgaacaccctttttttaccctgttacaacaacgtgccgcgcttcagtggccacagctgcgcgtggaacaacggccggcattaccgggcctggggccggccgtccggatcaatgacgctttcagcgtcagcatcaccgatggccgcacggcaaaccagctggccgagcagacggcggcggatgcctttgtggtcgatgtcgccctgaattacgccgacacggcgtatctggtggcagcgcacagccgccatgcctctgcagccaataaagcgctgttcttacgcctgctgcacacggcaatcccgcaggttgaatttatcaaggattccccggcgctgatcgtcgcccgcgtcctcagcagcctaatcaacgagtcggtgatcatggtggaaagcggcgtctgcagccgggaagacatcgatgtcgccgccgtcgccggcgttaactacgccgacggcattttcggctggctagatagcctgggggagaaaaacgtcaggacgacgctgagcaacctggcgcagctgctgcacgcagcacgctatgcgccgcattacacccttctgcacgccgcgcaaccggcgctgacgaccacgccttaa

SEQ ID NO: 147 - DNA, 1530 bp, Serratia marcescens at10508
atggcagaaagtaatgcggcaattcagtcggctgcgattatcggcgcgggaacgatgggcagaggcatcgcttatcttttcgcgcaaaaaggcattcgcacggtgctttataatcgcaacggcaataccctcaatcaggctcgcgactatatcgagctagacctgaacaagaaagtcgaacagggcaagatcgcgctgcaggataaaggcgcggtgttggccaatctggtgttcacctcggtatttgagaccattgccgacagcgagctggtgatagaaaccatcgccgagcaagagcaaaccaaacttgaggtgctggcggccatcgccgcggcagtcaagcccgacacgctgatcgccaccaatacctcctcactgtcgctgaataagctggcaaccgcggtgacgcacagcgagcggtttatcggtttgcacttttttaaccccgcgccgctgatgaaactgattgaaatcatcccggcctactttaccgcacacgccaccacggagcgttgccgtcaactggtgaccgcgttggggaaacgcgatgttgtctgccaggccacgccggggtttatcgtcaaccgcatggcccgcccctactacctggaagggttccgcctattggaagaacacgtggcgcgcgcgccgcagatcgaccgtgccctcaaggccggcgggcactttcgtatggggccgctcgagctgaccgattttatcggccaggacatcaactatcaggtcagtcggcaaatctggcaggacatgcaatacgacgcgcgctatacccccggccacctgcagcgttcgctggtcgatgccggtctattgggaaaaaagaacggccgctcctattttgccgtcgaagaaaacgccccgccggtgatggccgccaccgatgcagacattgagacgctgcacgtttacggcgaacaccctttttttaccctgttacaacaacgtgccgcgcttcagtggccacagctgcgcgtggaacaacggccggcattaccgggcctggggccggccgtccggatcaatgacgctttcaccgtcagcatcaccgatggccgcacggcaaaccagctggccgagcagacggcggcggatgcctttgtggtcgatgtcgccctgaattacgccgacacggcgtatctggtggcagcgcacagccgccatgcctctgcagccaataaagcgctgttcttacgcctgctgcacacggcaatcccgcaggttgaatttatcaaggattccccggcgctgatcgtcgcccgcgtcctcagcagcctaatcaacgagtcggtgatcatggtggaaagcggcgtctgcagccgggaagacatcgatgtcgccgccgtcgccggcgttaactacgccgacggcattttcggctggctagatagcctgggggagaaaaacgtcaggacgacgctgagcaacctggcgcagctgctgcacgcagcacgctatgcgccgcattacacccttctgcacgccgcgcaaccggcgctgacgaccacgccttaa

SEQ ID NO: 148 - DNA, 1530 bp, Serratia marcescens ML2637
atggcagaaagtaatgcggcaattcagtcggctgcgattatcggcgcgggaacgatgggcagaggcatcgcttatcttttcgcgcaaaaaggcattcgcacggtgctttataatcgcaacggcaataccctcaatcaggctcgcgactatatcgagctagacctgaacaagaaagtcgaacagggcaagatcgcgctgcaggataaaggcgcggtgttggccaatctggtgttcacctcggtatttgagaccattgccgacagcgagctggtgatagaaaccatcgccgagcaagagcaaaccaaacttgaggtgctggcggccatcgccgcggcagtcaagcccgacacgctgatcgccaccaatacctcctcactgtcgctgaataagctggcaaccgcggtgacgcacagcgagcggtttatcggtttgcacttttttaaccccgcgccgctgatgaaactgattgaaatcatcccggcctactttaccgcacacgccaccacggagcgttgccgtcaactggtgaccgcgttggggaaacgcgatgttgtctgccaggccacgccggggtttatcgtcaaccgcatggcccgcccctactacctggaagggttccgcctattggaagaacacgtggcgcgcgcgccgcagatcgaccgtgccctcaaggccggcgggcactttcgtatggggccgctcgagctgaccgattttatcggccaggacatcaactatcaggtcagtcggcaaatctggcaggacatgcaatacgacgcgcgctatacccccggccacctacagcgttcgctggtcgatgccggtctattgggaaaaaagaacggccgctcctattttgccgtcgaagaaaacgccccgccggtgatggccgccaccgatgcagacattgagacgctgcacgtttacggcgaacaccctttttttaccctgttacaacaacgtgccgcgcttcagtggccacagctgcgcgtggaacaacggccggcattaccgggcctggggccggccgtccggatcaatgacgctttcaccgtcagcatcaccgatggccgcacggcaaaccagctggccgagcagacggcggcggatgcctttgtggtcgatgtcgccctgaattacgccgacacggcgtatctggtggcagcgcacagccgccacgcctctgcagccaataaagcgctgttcttacgcctgctgcacacggcaatcccgcaggttgaatttatcaaggattccccggcgctgatcgtcgcccgcgtcctcagcagcctaatcaacgagtcggtgatcatggtggaaagcggcgtctgcagccgggaagacatcgatgtcgccgccgtcgccggcgttaactacgccgacggcattttcggctggctagatagcctgggggagaaaaacgtcaggacgacgctgagcaacctggcgcagctgctgcacgcagcacgctatgcgccgcattacacccttctgcacgccgtgcaaccggcgctgacgaccacgccttaa

SEQ ID NO: 149 - DNA, 1530 bp, Serratia marcescens SM1978
atggcagaaagtaatgcggcaattcagtcggctgcgattatcggcgcgggaacgatgggcagaggcatcgcttatcttttcgcgcaaaaaggcattcgcacggtgctttataatcgcaacggcaataccctcaatcaggctcgcgactatatcgagctagacctgaacaagaaagtcgaacagggcaagatcgcgctgcaggataaaggcgcggtgttggccaatctggtgttcacctcggtatttgagaccattgccgacagcgagctggtgatagaaaccatcgccgagcaagagcaaaccaaacttgaggtgctggcggccatagccgcggcagtcaagcccgacacgctgatcgccaccaatacctcctcactgtcgctgaataagctggcaaccgcggtgacgcacagcgagcggtttatcggtttgcacttttttaaccccgcgccgctgatgaaactgattgaaatcatcccggcctactttaccgcacacgccaccacggagcgttgccgtcaactggtgaccgcgttggggaaacgcgatgttgtctgccaggccacgccggggtttatcgtcaaccgcatggcccgcccctactacctggaagggttccgcctattggaagaacacgtggcgcgcgcgccgcagatcgaccgtgccctcaaggccggcgggcactttcgtatggggccgctcgagctgaccgattttatcggccaggacatcaactatcaggtcagtcggcaaatctggcaggacatgcaatacgacgcgcgctatacccccggccacctgcagcgttcgctggtcgatgccggtctattgggaaaaaagaacggccgctcctattttgccgccgaagaaaacgccccgccggtgatggcctccaccgatgcagacattgagacgctgcacgtttacggcgaacaccctttttttaccctgttacaacaacgtgccgcgcttcagtggccacagctgcgcgtggaacaacggccggcattaccgggcctggggccggccgtccggatcaatgacgctttcagcgtcagcatcaccgatggccgcacggcaaaccagctggccgagcagacgacggcggatgcctttgtggtcgatgtcgccctgaattacgccgacacggcgtatctggtggcagcgcacagccgccacgcctctgcagccaataaagcgctgttcttacgcctgctgcacacggcaatcccgcaggttgaatttatcaaggattccccggcgctgatcgtcgcccgcgtcctcagcagcctaatcaacgagtcggtgatcatggtggaaagcggcgtctgcagccgggaagacatcgatgtcgccgccgtcgccggcgttaactacgccgacggcattttcggctggctagatagcctgggggagaaaaacgtcaggacgacgctgagcaacctggcgcagctgctgcacgcagcacgctatgcgccgcattacacccttctgcacgccgcgcaaccggcgctgacgaccacgccttaa

SEQ ID NO: 150 - DNA, 1530 bp, Serratia marcescens PWN146
atggcagaaagtaatgcggcaattcagtcggctgcgattatcggcgcgggaacgatgggcagaggcatcgcttatcttttcgcgcaaaaaggcattcgcacggtgctttataatcgcaacggcaataccctcaatcaggctcgcgactatatcgagctagacctgaacaagaaagtcgaacagggcaagatcgcgctacaggataaaggcgcggtgttggccaatctggtgttcacctcggtatttgagaccattgccgacagcgagctggtgatagaaaccatcgccgagcaagagcaaaccaaacttgaggtgctggcgaccatcgccgcggcagtcaagcccgacacgctgatcgccaccaatacctcctcactgtcgctaaataagctggcaaccgcggtgacgcacagcgagcggtttatcggtttgcacttttttaaccccgcgccgctgatgaaactgattgaaatcatcccggcctactttaccgcacacgccaccacggagcgttgccgtcaactggtggccgcgttgggaaaacgcgacgttgtctgccaggccacgccggggtttatcgtcaaccgcatggcccgcccctactacctggaagggttccgcctattggaagaacacgtggcgcgcgcgccgcagatcgaccgtgccctcaaggccggcgggcactttcgtatggggccgctcgaactgaccgattttatcggccaggacatcaactatcaggtcagccggcaaatctggcaggacatgcaatacgacgcgcgctatacccccggccacctgcagcgttcgctggtcgatgccggtctattgggaaaaaagaacggccgctcctattttgccgtcgaagaaaacgccccgccggtgatggccgccaccgatgcagacattgagacgctgcacgtctgcggcgaacaccctttttttactctgttgcaacagcgagccgcacttcagtggccacggctgcgcgtggaacaacggccggccttgccgggcctggggcccgccgtctggatcaatgacgctttcaccgtcagcatcaccgatggccgcacggcaaaccagctggccgagcagacggcggcggatgcctttgtggtcgatgtcgccctgaattacgccgacacggcgtatctggtggcagcacacagccgccacgcctctgcggccaataaagcgctgttcttacgcctgctgcacaccgcaatcccgcaggttgaatttatcaaggattccccggcgctgatcgtcgctcgcgtcctcagcagcctgatcaatgagtcggtgatcatggtggaaagcggcgtctgcagccgggaagacatcgatgtcgccgccgtcgccggcgttaactacgccgacggcattttcggctggctcgatagcctgggggagaaaaacgtcagggcgacgctgagcaacttggcgcagctgctgcacgcggcgcgctatgcgccgcattacacccttctgcacgccgcgcaaccggcgctgacgaccacgccttaa

SEQ ID NO: 151 - DNA, 1530 bp, Serratia marcescens H1q
atggcagaacgtaatgcggcaattcaatcggctgcgattatcggcgcgggaacgatgggcagaggcatcgcttatcttttcgcgcaaaaaggcattcgtacggtgctttataatcgcaacggcaataccctcattcaggctcgtgaatatatcgtgcaagacctggacaaaaaggtcgaacagggcaggctcgcgccgcaggataaagacgcggtgctggccaatctgcagttctcatcggtgtttgaagctatcgtcgacagcgatttggtgctcgaaactatcgccgagcaagagcaagccaaactcgaggtgctggccgccatcgctgcggcggtcaaacccgacacgctgatcgccaccaatacgtcctcattgtcgctcaataagctggcaacggcggtgacccacagcgaacgctttatcggtttgcactttttcaaccccgcaccgctaatgaagctgattgaaatcattccggcctactttaccgcccaagccaccactgaaacttgccgccaactggtggcggcattggggaaacgcgatgtcgtctgccaggctacgccggggttcatcgtcaaccgtatggcccgcccctactacctggaaggctttcgcctgttggaagagcacgtggcgcgcgcgccgcagatcgaccgcgccctcaaggccggcggacactttcgcatggggccgctcgagctgaccgattttatcggccaggacatcaactatcaggtcagccggcaaatttggcaggacatgcagtacgacccgcgctatacccccggccatctgcagcgttcgctggtcgatgccgggctgctggggaaaaagaacggtcgctcctatttttccgccgaagaaaccgccccgccggttgaggccgccgtcgaggcggatgtcgagacgctgcgcatttacggcgaacaccctttgtttaccctgctgcaacagcgagccgcactgcaatggccgcagttgcgcgtggaacagcggccggccttgtcgggcctgggagcggccattcaggtcaatgacgctttcaccgtcagcatcaccgatggccgcacggcaaatcagttggccgagcagacggcggcggacgcctttgtggtcgatgtcgccctgaactacgccgacacggcgtatctggtggcggcgcacagccgccacgcctctgcggctaataaggcgttgtttttgcgcctgctgcacaccgcgcttccgcaggttgaatttatcaaggactccccggcgctgatcgtcgcccgcgtcctcagcagcctgatcaacgagtcggtgatcatggtggaaagcggcgtctgcagccgggaagacatcgatgtcgccgccgtcgccggcgtgaactacgccgacggcattttcggctggctcactcgcctgggggagaaaaacgtcaggacgacgctgagcaacctggcgcagctgctgcacgcggcccgctatgcgccgcattacacccttctgcacgccgcccaaccggcgctgaccaccacgccttaa

SEQ ID NO: 152 - DNA, 1530 bp, Serratia marcescens UMH6
atggcagaaagtaatgcggcaattcaatcggctgcgattatcggcgcgggaacgatgggcagaggcatcgcttatctttttgcgcaaaaaagcattcgtacggtgctttataatcgcaacggcaataccctcaatcaagctcgcgacgctatcgtgcaagacctgaacaaaaaggtggaacagggcaagctcgcgctgcaggacaaagacgcggtgctggctaatctgacgttctccgcggaatttggggccatcgccgacagcgatctggtgatcgaaaccatcgcagagcatgagcaagccaaactcgaagtgctggcggccatcgccgcgacggtcaagcccgacacgctgatcgccaccaatacctcctcactgtcgcttaataagctggcgacagcggtgacgcacagcgaacgctttatcggtttgcactttttcaaccccgcgccgctgatgaagctgattgaaatcattccggcctattttaccgcacaggtcaccaccgaacgttgccgtcaactggtggcggcgttggggaaacgcgatgtcgtctgccaggccacgccgggatttatcgtcaaccgtatggcccgcccctactatctggaagggttccgcctgttggaagaacacgtggcgcgtgcgccgcagatcgaccgcgccctcaaagccggcggacactttcgcatggggccgctcgagctgaccgattttatcggtcaggacatcaactatcaggtcagccggcaaatttggcaggacatgcagtacgatccgcgctataccccgggccatctgcagcgctcgctggtcgatgccggtctgttgggcaaaaagaacggccgctcctatttctccgccgaagaatctcccccgccgcttgcggccgccgtcgatgcggaggtcgagacgctacgcatttacggtgaacatcctctctttaccctgctacagcagcgggccgccctgcaatggccgcggctgcgcgttgaacaacggccgacattaccgggcctgggcgccgccattcaggtcaatgacgctttcaccgtcagcgttaccgatggccgcacggcaaaccagcttgccgaacagaccgcggcggacgcctttgtcgtcgatgttgccctgaactacggcgatacggcgtacctggtggcggcacatagccgccacgcctctgcggccaataaggcgctgtttttacgcctgctgcacaccgcgatcccgcaggtggaatttatcaaggattccccggccctgatcgtcgcccgcgtgctcagcagcctgatcaacgagtcggtgatcatggtggaaagcggcgtctgcagccgggaagacattgatgtcgccgccgtcgccggcgtgaactacgccgacggtattttcggctggctcactcgcctcggggaggaaaatgtcaggacgacgctgagcaacctggcgcaattgctgcacgcggcgcgctatgcgccgcattacacccttctgcacgccgcccaaccggcgctgaccaccacgccttaa

SEQ ID NO: 153 - DNA, 1530 bp, Serratia nematodiphila WCU338
atggcagaaagtaatgcggcaattcaatcggctgcgattatcggcgcgggaacgatgggcagaggcatcgcttatcttttcgcgcaaaaaagcattcgtacggtgctttataatcgcaacggcaataccctcaatcaagctcgcgacgctatcgtgcaagacctgaacaaaaaggtggaacagggcaagctcgcgctgcaggataaagacgcggtgctggctaatctgacgttctccgcggaatttggggccatcgccgacagcgatctggtgatcgaaaccatcgcagaacatgagcaagccaaactcgaggtgctggcggccatcgccgcgacggtcaagcccgacacgctgatcgccaccaatacctcctcactgtcgctgaataagctggcgacggcggtgacgcacagcgaacgctttatcggtttgcactttttcaaccccgcgccgctgatgaagctgattgaaatcattccggcctattttaccgcacagatcaccaccgaacgttgccgtcaactggtggcggcattggggaaacgcgatgtcgtctgtcaggccacgccggggtttatcgtcaaccgtatggctcgcccctactatctggaaggattccgcctgttggaagaacacgtggcgcgtgcgccgcagatcgaccgcgccctcaaagccggcggacactttcgcatggggccgctcgagctgaccgattttatcggtcaggacatcaactatcaggtcagccggcaaatttggcaggacatgcagtacgatccgcgctataccccgggccatctgcagcgctcgctggtcgatgccggtttgctggggaaaaagaacggccgctcctatttttccgccgaagaatctcccccgccgcttgcagccgccgtcgatgcggaggtcgagacgctacgcatttacggtgaacatcctctctttaccctgctacagcagcgggccgccctgcaatggccgcggctgcgcgtggaacagcggccgacattaccaggcctgggcgccgccattcaggtcaatgacgctttcaccgtcagcgttaccgatggccgcacggcaaaccagcttgccgaacagaccgcggcggacgcctttgtcgtcgatgtcgccctgaactacggcgatacggcgtacctggtggcggcgcatagccgccacgcatctgcggccaataaggcgctgtttttacgcctgctgcacaccgcgatcccgcaggtggaatttatcaaggattccccggccttgatcgtcgcccgcgtgctcagcagcctgatcaacgagtcggtgatcatggtggaaagcggcgtctgcagccgggaagacattgatgtcgccgccgtcgccggcgtgaactacgccgacggtattttcggctggctcactcgcctcggggaggaaaatgtcaggacgacgctgagcaacctggcgcaattgctgcacgcggcgcgctatgcgccgcattacacccttctgcacgccgcccaaccggcgctgaccaccacgccttaa

SEQ ID NO: 154 - DNA, 1530 bp, Serratia sp. OLEL1
atggcagaaagtaatgcggcaattcaatcggctgcgattatcggcgcgggaacgatgggcagaggcatcgcttatcttttggcgcaaaaaagcattcgtacggtgctttataatcgcaacggcaataccctcaatcaagctcgcgacgctatcgtgcaagacctgaacaaaaaggtggaacagggcaagctcgcgctgcaggacaaagacgcggtgctggctaatctgacgttctccgcggaatttggggccatcgccgacagcgatctggtgatcgaaaccatcgcagagcatgagcaagccaaactcgaagtgctggcggccatcgccgcgacggtcaagcccgacacgctgatcgccaccaatacctcctcactgtcgcttaataagctggcgacggcggtgacgcacagcgaacgctttatcggtttgcactttttcaaccccgcgccgctgatgaagctgattgaaatcattccggcctattttaccgcacaggtcaccaccgaacgttgccgtcaactggtggcggcgttggggaaacgcgatgtcgtctgccaggccacgccgggatttatcgtcaaccgtatggcccgcccctactatctggaagggttccgcctgttggaagaacacgtggcgcgtgcgccgcagatcgaccgcgccctcaaagccggcggacactttcgcatggggccgctcgagctgaccgattttatcggtcaggacatcaactatcaggtcagccggcaaatttggcaggacatgcagtacgatccgcgctataccccgggccatctgcagcgctcgctggtcgatgccggtctgttgggcaaaaagaacggccgctcctatttctccgccgaagaatctcccccgccgcttgcggccgccgtcgatgcggaggtcgagacgctacgcatttacggtgaacatcctctctttaccctgctacagcagcgggccgccctgcaatggccgcggctgcgcgtggaacaacggccgacattaccgggcctgggcgccgccattcaggttaatgacgctttcaccgtcagcgttaccgatggccgcacggcaaaccagcttgccgaacagactgcggcggacgcctttgtcgtcgatgtcgccctgaactacggcgatacggcgtacctggtggcggcgcatagccgccacgcctctgcggccaataaggcgctgtttttacgcctgctgcacaccgcgatcccgcaggtggaatttatcaaggattccccggccttgatcgtcgcccgcgtgctcagcagcctgatcaacgagtcggtgatcatggtggaaagcggcgtctgcagccgggaagacattgatgtcgccgccgtcgccggcgtgaactacgccgacggcattttcggctggctcactcgcctcggggaggaaaatgtcaggacgacgctgagcaacctggcgcaattgctgcacgcggcgcgctatgcgccgcattacacccttctgcacgccgcccaaccggcgctgaccaccacgccttaa

SEQ ID NO: 155 - DNA, 1530 bp, Serratia marcescens 7209
atggcagaaagtaatgcggcaattcaatcggctgcgattatcggcgcgggaacgatgggcagaggcatcgcttatctttttgcgcaaaaaagcattcgtacggtgctttataatcgcaacggcaataccctcaatcaagctcgcgacgctatcgtgcaagacctgaacaaaaaggtggaacagggcaagctcgcgctgcaggacaaagacgcggtgctggctaatctgacgttctccgcagaatttggggtcatcgccgacagcgatctggtgatcgaaaccatcgcagaacatgagcaagccaaactcgaggtgctggcggccatcgccgcgacggtcaagcccgacacgctgatcgccaccaatacctcctcactgtcgcttaataagctggcgacggcggtgacgcacagcgaacgctttatcggtttgcactttttcaaccccgcgccgctgatgaagctgattgaaatcattccggcctattttaccgcacaggtcaccaccgaacgttgccgtcaactggtggcggcgttagggaaacgcgatgtcgtctgtcaggccacgccgggatttatcgtcaaccgtatggcccgcccctactatctggaagggttccgcctgttggaagaacacgtggcgcgtgcgccgcagatcgaccgcgccctcaaagccggcggacactttcgcatggggccgctcgagctgaccgattttatcggtcaggacatcaactatcaggtcagccggcaaatttggcaggacatgcagtacgatccgcgctataccccgggccatctgcagcgctcgctggtcgatgccggtctgttgggcaaaaagaacggccgctcctatttttccgccgaagaatctcccccgccgcttgcggccgccgtcgatgcggaagtcgagacgctacgcatttacggtgaacatcctctctttaccctgctacagcagcgggccgccctgcaatggccgcggctgcgcgtggaacaacggccgacattaccgggcctgggcgccgccattcaggtcaatgacgctttcaccgtcagcgttaccgatggccgcacggcaaaccagcttgccgaacagaccgcggcggacgcctttgtcgtcgatgtcgccctgaactacggcgatacggcgtacctggtggcggcacatagccgccatgcctctgcggccaataaggcgctgtttttacgcctgctgcacaccgcgatcccgcaggtggaatttatcaaggattccccggccttgatcgtcgcccgcgtgctcagcagcctgatcaacgagtcggttatcatggtggaaagcggcgtctgcagccgggaagacattgatgtcgccgccgtcgccggcgtgaactacgccgacggtattttcggctggctcactcgcctcggggaggaaaatgtcaggacgacgctgagcaacctggcgcaattgctgcacgcggcgcgctatgcgccgcattacacccttctgcacgccgcccaaccggcgctgaccaccacgccttaa

SEQ ID NO: 156 - DNA, 1530 bp, Serratia marcescens sicaria (Ss1)
atggcagaaagtaatgcggcaattcaatcggctgcgattatcggcgcgggaacgatgggcagaggcatcgcttatctttttgcgcaaaaaagcattcgtacggtgctttataatcgcaacggcaataccctcaatcaagctcgcgacgctatcgtgcaagacctgaacaaaaaggtggaacagggcaagctcgcgctgcaggacaaagacgcggtgctggctaatctgacgttctccgcggaatttggggccatcgccgacagcgatctggtgatcgaaaccatcgcagagcatgagcaagccaaactcgaggtgctggcggccatcgccgcgacggtcaagcccgacacgctgatcgccaccaatacctcctcactgtcgcttaataagctggcgacggcggtgacgcacagcgaacgctttatcggtttgcactttttcaaccccgcgccgctgatgaagctgattgaaatcattccggcctattttaccgcacaggtcaccaccgaacgttgccgtcaactggtggcggcgttggggaaacgcgatgtcgtctgccaggccacgccgggatttatcgtcaaccgtatggcccgcccctactatctggaagggttccgcctgttggaagaacacgtggcgcgtgcgccgcagatcgaccgcgccctcaaagccggcggacactttcgcatggggccgctcgagctgaccgattttatcggtcaggacatcaactatcaggtcagccggcaaatttggcaggacatgcagtacgatccgcgctataccccgggccatctgcagcgctcgctggtcgatgccggtctgttgggcaaaaagaacggccgctcctatttttccaccgaagaatctcccccgccgcttgcggccgccgtcgatgcggaggtcgagacgctacgcatttacggtgaacatcctctctttaccctgctacagcagcgggccgccctgcaatggccgcggctgcgcgtggaacaacggccgacattaccgggcttgggcgccgccattcaggtcaatgacgctttcaccgtcagcgttaccgatggccgcacggcaaaccagcttgccgaacagaccgcggcggacgcctttgtcgtcgatgtcgccctgaactacggcgatacggcctacctggtggcggcgcatagccgccacgcctctgcggccaataaggcgctgtttttacgcctgctgcacaccgcgatcccgcaggtggaatttatcaaggattccccggccttgatcgtcgcccgcgtgctcagcagcctgattaacgagtcggtgatcatggtggaaagcggcgtctgtagccgggaagacattgatgtcgccgccgtcgccggcgtgaactacgccgacggtattttcggctggctcactcgcctcggggaggaaaatgtcaggacgacgctgagcaacctggcgcaattgctgcacgcggcgcgctatgcgccgcattacacccttctgcacgccgcccaaccggcgctgaccaccacgccttaa

SEQ ID NO: 157 - DNA, 1530 bp, Serratia sp. OLFL2
atggcagaaagtaatgcggcaattcaatcggctgcgattatcggcgcgggaacgatgggcagaggcatcgcttatcttttggcgcaaaaaagcattcgtacggtgctttataatcgcaacggcaataccctcaatcaagctcgcgacgctatcgtgcaagacctgaacaaaaaggtggaacagggcaagctcgcgctgcaggacaaagacgcggtgctggctaatctgacgttctccgcggaatttggggccatcgccgacagcgatctggtgatcgaaaccatcgcagagcatgagcaagccaaactcgacgtgctggcggccatcgccgcgacggtcaagcccgacacgctgatcgccaccaatacctcctcactgtcgcttaataagctggcgacggcggtgacgcacagcgaacgctttatcggtttgcactttttcaaccccgcgccgctgatgaagctgattgaaatcattccggcctattttaccgcacaggtcaccaccgaacgttgccgtcaactggtggcggcgttggggaaacgcgatgtcgtctgccaggccacgccgggatttatcgtcaaccgtatggcccgcccctactatctggaagggttccgcctgttggaagaacacgtggcgcgtgcgccgcagatcgaccgcgccctcaaagccggcggacactttcgcatggggccgctcgagctgaccgattttatcggtcaggacatcaactatcaggtcagccggcaaatttggcaggacatgcagtacgatccgcgctataccccgggccatctgcagcgctcgctggtcgatgccggtctgttgggcaaaaagaacggccgctcctatttctccgccgaagaatctcccccgccgcttgcggccgccgtcgatgcggaggtcgagacgctacgcatttacggtgaacatcctctctttaccctgctacagcagcgggccgccctgcaatggccgcggctgcgcgtggaacaacggccgacattaccgggcctgggcgccgccattcaggttaatgacgctttcaccgtcagcgttaccgatggccgcacggcaaaccagcttgccgaacagactgcggcggacgcctttgtcgtcgatgtcgccctgaactacggcgatacggcgtacctggtggcggcgcatagccgccacgcctctgcggccaataaggcgctgtttttacgcctgctgcacaccgcgatcccgcaggtggaatttatcaaggattccccggccttgatcgtcgcccgcgtgctcagcagcctgatcaacgagtcggtgatcatggtggaaagcggcgtctgcagccgggaagacattgatgtcgccgccgtcgccggcgtgaactacgccgacggcattttcggctggctcactcgcctcggggaggaaaatgtcaggacgacgctgagcaacctggcgcaattgctgcacgcggcgcgctatgcgccgcattacacccttctgcacgccgcccaaccggcgctgaccaccacgccttaa

SEQ ID NO: 158 - DNA, 1530 bp, Serratia marcescens BIDMC 81
atggcagaaagtaatgcggcaattcaatcggctgcgattatcggcgcgggaacgatgggcagaggcatcgcttatcttttggcgcaaaaaagcattcgtacggtgctttataatcgcaacggcaataccctcaatcaagctcgcgacgctatcgtgcaagacctgaacaaaaaggtggaacagggcaagctcgcgctgcaggacaaagacgcggtgctggctaatctgacgttctccgcggaatttggagccatcgccgacagcgatctggtgatcgaaaccatcgcagagcatgagcaagccaaactcgaggtgctggcggccatcgccgcgacggtcaagcccgacacgctgatcgccaccaatacctcctcactgtcgcttaataagctggcgacggcggtaacgcacagcgaacgctttatcggtttgcactttttcaaccccgcgccgctgatgaagctgattgaaatcattccggcctattttaccgcacaggtcaccaccgaacgttgccgtcaactggtggcggcgttggggaaacgcgatgtcgtctgccaggccacgccgggatttatcgtcaaccgtatggcccgcccctactatctggaagggttccgcctgttggaagaacacgtggcgcgtgcgccgcagatcgaccgagccctcaaagccggcggacactttcgcatggggccgctcgagctgaccgattttatcggtcaggacatcaactatcaggtcagccggcaaatttggcaggacatgcagtacgatccgcgctataccccgggccatctgcagcgctcgctggtcgatgccggtctgttgggcaaaaagaacggccgctcctatttttccgccgaagaatctcccccgccgcttgcggccgccgtcgatgcggaggtcgagacgctacgcatttacggtgaacatcctctctttaccctgctacagcagcgggccgccctgcaatggccgcggctgcgcgtggaacaacggccgacattaccggacctgggcgccgccattcaggtcaatgacgctttcaccgtcagcgttaccgatggccgcacggcaaaccagcttgccgaacagaccgcggcggacgcctttgtcgtcgatgtcgccctgaactacggcgatacggcgtacctggtggcggcgcatagccgccacgcctctgcggccaataaggcgctgtttttacgcctgctgcacaccgcgatcccgcaggtggaatttatcaaggattccccggccttgatcgtcgcccgcgtgctcagcagcctgatcaacgagtcggtgatcatggtggaaagcggcgtctgcagccgggaagacattgatgtcgccgccgtcgccggcgtgaactacgccgacggtattttcggctggctcactcgcctcggggaggaaaatgtcaggacgacgctgagcaacctggcgcaattgctgcacgcggcgcgctatgcgccgcattacacccttctgcacgccgcccaaccggcgctgaccaccacgccttaa

SEQ ID NO: 159 - DNA, 1530 bp, Serratia marcescens BIDMC 50
atggcagaaagtaatgcggcaattcaatcggctgcgattatcggcgcgggaacgatgggcagaggcatcgcttatctttttgcgcaaaaaagcattcgtacggtgctttataatcgcaacggcaataccctcaatcaagctcgcgacgctatcgtgcaagacctgaacaaaaaggtggaacagggcaagctcgcgctgcaggacaaagacgtggtgctggctaatctgacgttctccgcggaatttggggccatcgccgacagcgatctggtgatcgaaaccatcgcagagcatgagcaagccaaactcgaggtgctggcggccatcgccgcgacggtcaagcccgacacgctgatcgccaccaatacctcctcactgtcgcttaataagctggcgacggcggtgacgcacagcgaacgctttatcggtttgcactttttcaaccccgcgccgctgatgaagctgattgaaatcattccggcctattttaccgcacaggtcaccaccgaacgttgccgtcaactggtggcggcgttagggaaacgcgatgtcgtctgtcaggccacgccgggatttatcgtcaaccgtatggcccgcccctactatctggaagggttccgcctgttggaagaacacgtggcgcgtgcgccgcagatcgaccgcgccctcaaagccggcggacactttcgcatggggccgctcgagctgaccgattttatcggtcaggacatcaactatcaggtcagccggcaaatttggcaggacatgcagtacgatccgcgctataccccgggccatctgcagcgctcgctggtcgatgccggtctgttgggcaaaaagaacggccgctcctatttttccgccgaagaatctcccccgccgcttgcggccgccgtcgatgcggaggtcgagacgctacgcatttacggtgaacatcctctctttaccctgctacagcagcgggccgccctgcaatggccgcggctgcgcgtggaacaacggccgacattaccggacctgggcgccgccattcaggtcaatgacgctttcaccgtcagcgttaccgatggccgcacggcaaaccagcttgccgaacagaccgcggcggacgcctttgtcgtcgatgtcgccctgaactacggcgatacggcgtacctggtggcggcacatagccgccatgcctctgcggccaataaggcgctgtttttacgcctgctgcacaccgcgatcccgcaggtggaatttatcaaggattccccggccttgatcgtcgcccgcgtgctcagcagcctgatcaacgagtcggtgatcatggtggaaagcggcgtctgcagccgggaagacattgatgtcgccgccgtcgccggcgtgaactacgccgacggtattttcggctggctcactcgcctcggggaggaaaatgtcaggacgacgctgagcaacctggcgcaattgctgcacgcggcgcgctatgcgccgcattacacccttctgcacgccgcccaaccggcgctgaccaccacgccttaa

SEQ ID NO: 160 - DNA, 1530 bp, Serratia marcescens UMH7
atggcagaaagtaatgcggcaattcaatcggctgcgattatcggcgcgggaacgatgggcagaggcatcgcttatcttttggcgcaaaaaagcattcgtacggtgctttataatcgcaacggcaataccctcaatcaagctcgcgacgctatcgtgcaagacctgaacaaaaaggtggaacagggcaagctcgcgctgcaggacaaagacacggtgctggctaatctgacgttctccgcggaatttggggccatcgccgacagcgatctggtgatcgaaaccatcgcagagcatgagcaagccaaactcgaggtgctggcggccatcgccgcgacggtcaagcccgacacgctgatcgccaccaatacctcctcactgtcgcttaataagctggcgacggcggtgacgcacagcgaacgctttatcggtttgcactttttcaaccccgcgccgctgatgaagctgattgaaatcattccggcctattttaccgcacaggtcaccaccgaacgttgccgtcaactggtggcggcgttggggaaacgcgatgtcgtctgtcaggccacgccgggatttatcgtcaaccgtatggcccgcccctactatctggaagggttccgcctgttggaagaacacgtggcgcgtgcgccgcagatcgaccgcgccctcaaagccggcggacactttcgcatggggccgctcgaactgaccgattttatcggtcaggacatcaactatcaggtcagccggcaaatttggcaggacatgcagtacgatccgcgctataccccgggccatctgcagcgctcgctggtcgatgccggtctgttgggcaaaaagaacggccgctcctatttttccgccgaagaatctcctccgccgcttgcggccgccgtcgatgcggaggtcgagacgctacgcatttacggtgaacatcctctctttactctgctacagcagcgggccaccctgcaatggccgcggctgcgcgtggaacaacggccgacattaccgggcctgggcgccgccattcaggttaatgacgctttcaccgtcagcgttaccgatggccgcacggcaaaccagcttgccgaacagaccgcggcggacgcctttgtcgtcgatgtcgccctgaactacggcgatacggcgtacctggtggcggcgcatagccgccacgcctctgcagccaataaggcgctgtttttacgcctgctgcacaccgcgatcccgcaggtggaatttatcaaggattccccggccttgatcgtcgcccgcgtgctcagcagcctgatcaacgagtcggtgatcatggtggaaagcggcgtctgcagccgggaagacattgatgtcgccgccgtcgccggcgtgaactacgccgacggtattttcggctggctcactcgcctcggggaggaaaatgtcaggacgacgctgagcaacctggcgcaattgctgcacgcggcgcgctatgcgccgcattacacccttctgcacgccgcccaaccggcgctgaccaccacgccttaa

SEQ ID NO: 161 - DNA, 1530 bp, Serratia marcescens RSC-14
atggcagaaagtaatgcggcaattcaatcggctgcgattatcggcgcgggaacgatgggcagaggcatcgcttatcttttggcgcaaaaaagcattcgtacggtgctttataatcgcaacggcaataccctcaatcaagctcgcgacgctatcgtgcaagacctgaacaaaaaggtggaacagggcaagctcgcgctgcaggacaaagacgcggtgctggctaatctgacgttctccacggaatttggggccatcgccgacagcgatctggtgatcgaaaccatcgcagagcatgagcaagccaaactcgaagtgctggcggccatcgccgcgacggtcaagcccgacaggctgatcgccaccaatacctcctcactgtcgcttaataagctggcgacggcggtgacgcacagcgaacgctttatcggtttgcactttttcaaccccgcgccgctgatgaagctgattgaaatcattccggcctattttaccgcacaggtcaccaccgaacgttgccgtcaactggtggcggcgttagggaaacgcgatgtcgtctgtcaggccacgccgggatttatcgtcaaccgtatggcccgcccctactatctggaagggttccgcctgttggaagaacacgtggcgcgtgcgccgcagatcgaccgcgccctcaaagccggcggacactttcgcatggggccgctcgagctgaccgattttatcggtcaggacatcaactatcaggtcagccggcaaatttggcaggacatgcagtacgatccgcgctataccccgggccatctgcagcgctcgctggtcgatgccggtctgttgggcaaaaagaacggccgctcctatttttccgccgaagaatctcccccgccgcttgcggccgccgtcgatgcggaagtcgagacgctacgcatttacggtgaacatcctctctttaccctgctacagcagcgggccgccctgcaatggccgcggctgcgcgtggaacaacagccgacattaccgggcctgggcgccgccattcaggtcaatgacgctttcaccgtcagcgttaccgatggccgcacggcaaaccagcttgccgaacagaccgcggcggacgcctttgtcgtcgatgtcgccctgaactacggcgatacggcgtacctggtggcggcacatagccgccatgcctctgcggccaataaggcgctgtttttacgcctgctgcacaccgcgatcccgcaggtggaatttatcaaggattccccggccttgatcgtcgcccgcgtgctcagcagcctgatcaacgagtcggtgatcatggtggaaagcggcgtctgcagccgggaagacattgatgtcgccgccgtcgccggcgtgaactacgccgacggtattttcggctggctcactcgcctcggggaggaaaatgtcaggacgacgctgagcaacctggcgcaattgctgcacgcggcgcgctatgcgccgcattacacccttctgcacgccgcccaaccggcgctgaccaccacgccttaa

SEQ ID NO: 162 - DNA, 1530 bp, Serratia marcescens SM03
atggcagaacgtaatgcggcaattcaatcggctgcgattatcggcgcgggaacgatgggcagaggcatcgcttatcttttcgcgcaaaaaggcattcgtacggtgctttataatcgcaacggcaataccctcattcaggctcgtgaatatatcgtgcaagacctggacaaaaaggtcgaacagggcaggctcgcgccgcaggataaagacgcggtgctggccaatctgcagttctcatcggtgtttgaagctatcgtcgacagcgatttggtgctcgaaactatcgccgagcaagagcaagccaaactcgaggtgctggccgccatcgctgcggcggtcaaacccgacacgctgatcgccaccaatacgtcctcattgtcgctcaataagctggcaacggcggtgacccacagcgaacgctttatcggtttgcactttttcaaccccgcaccgctaatgaagctgattgaaatcattccggcctactttaccgcccaagccaccactgaaacttgccgccaactggtggcggcattggggaaacgcgatgtcgtctgccaggctacgccggggttcatcgtcaaccgtatggcccgcccctactacctggaaggctttcgcctgttggaagagcacgtggcgcgcgcgccgcagatcgaccgcgccctcaaggccggcggacactttcgcatggggccgctcgagctgaccgattttatcggccaggacatcaactatcaggtcagccggcaaatttggcaggacatgcagtacgacccgcgctatacccccggccatctgcagcgttcgctggtcgatgccgggctgctggggaaaaagaacggtcgctcctatttttccgccgaagaaaccgccccgccggttgaggccgccgccgaggcggatgtcgagacgctgcgcatttacggcgaacaccctttgtttaccctgctgcaacagcgagccgcactgcaatggccgcagttgcgcgtggaacagcggccggccttgtcgggcctgggagcggccattcaggtcaatgacgctttcaccgtcagcgtcaccgatggccgcacggcaaatcagttggccgagcagacggcggcggacgcctttgtggtcgatgtcgccctgaactacgccgacacggcgtatctggtggcggcgcacagccgccacgcctctgcggctaataaggcgttgtttttgcgcctgctgcacaccgcgcttccgcaggttgaatttatcaaggactccccggcgctgatcgtcgcccgcgtcctcagcagcctgatcaacgagtcggtgatcatggtggaaagcggcgtctgcagccgggaagacatcgatgtcgccgccgtcgccggcgtgaactacgccgacggcattttcggctggctcactcgcctgggggagaaaaacgtcaggacgacgctgagcaacctggcgcagctgctgcacgcggcccgctatgcgccgcattacacccttctgcacgccgcccaaccggcgctgaccaccacgccttaa

SEQ ID NO: 163 - DNA, 1530 bp, Serratia marcescens 90-166
atggcagaaagtaatgcggcaattcaatcggctgcaattatcggcgcgggaacgatgggcagaggcatcgcttatcttttcgcgcaaaaaggcattcgtacggtgctttataatcgcaacggcaataccctcattcaggctcgtgaatatatcgtgcaagacctggacaaaaagatcgaacagggcagggtcgcgccgcaggataaagacgcggtgctggctaatctgacgttctccgcggaatttggggccatcgtcgacagcgatctggtgatcgaaaccattgcagagcatgagcaagccaaactcgaggtgctggcggccatcgccgcgacggtcaagcccgacacgctgatcgccaccaatacctcctcactgtcgctgaataagctggcgacggcggtgacgcacagcgaacgctttatcggtttgcactttttcaaccccgcgccgctgatgaagctgattgaaatcattccggcctattttaccgcacaggtcaccaccgaacgttgccgtcaactggtggcggcattggggaaacgcgatgtcgtctgtcaggccacgccggggtttatcgtcaaccgtatggctcgcccctactatctggaagggttccgcctgttggaagaacacgtggcacgtgcgccgcagatcgaccgcgccctcaaagccggcggacactttcgcatggggccgctcgagctgaccgattttatcggtcaggacatcaactatcaggtcagccggcaaatttggcaggacatgcagtacgatccgcgctataccccgggccatctgcagcgctcgctggtcgatgccggtctgttgggcaaaaagaacggccgctcctatttttccgccgaagaatctcccccgccgcttgcagccgccgtcgatgcggagatcgagacgctgcgcatttacggtgaacatcctctctttaccctgctacagcagcgggccgccctgcaatggccgcggctgcgcgtggaacaccggccgacattaccgggcctgggcgccgccattcaggtcaatgatgctttcaccgtcagcgttaccgatggtcgcacggcaaaccagcttgccgaacagaccgcggcggacgcctttgtcgtcgatgtcgccctgaactacggcgatacggcgtacctggcggcggcgcatagccgccacgcctctgcggccaataaggcgctgtttttacgcctgctgcacaccgcgatcccccaggtggaatttatcaaggattccccggccttgatcgtcgcccgcgtgctcagcagcctgatcaacgagtcggtgatcatggtggaaagcggcgtctgcagccgggaagacattgatgtcgccgccgtcgccggcgtgaactacgccgacggtattttcgtctggctcactcgcctcggggaggaaaatgtcaggacgacgctgagcaacctggcgcaattgctgcacgcggcgcgctatgcaccgcattacacccttctgcacgccgcccaaccggcgctgacctccacgccttaa

SEQ ID NO: 164 - DNA, 1530 bp, Serratia marcescens UMH2
atggcagaaagtaatgcggcaattcaatcggctgcgattatcggcgcgggaacgatgggcagaggcatcgcttatcttttggcgcaaaaaagcattcgtacggtgctttataatcgcaacggcaataccctcaatcaagctcgcgacgctatcgtgcaagatctgaacaaaaaggtggaacagggcaagctcgcgctgcaggacaaagacgcggtgctggctaatctgacgttctccacggaatttggggccatcgccgacagcgatctggtgatcgaaaccatcgcagagcatgagcaagccaaactcgaagtgctggcggccatcgccgcgacggtcaagcccgacacgctgatcgccaccaatacctcctcactgtcgcttaataagctggcgacggcggtgacgcacagcgaacgctttatcggtttgcactttttcaaccccgcgccgctgatgaagctgattgaaatcattccggcctattttaccgcacaggtcaccaccgaacgttgccgtcaactggtggcggcgttggggaaacgcgatgtcgtctgtcaggccacgccgggatttatcgtcaaccgtatggcccgcccctactatctggaagggttccgcctgttggaagaacacgtggcgcgtgcgccgcagatcgaccgcgccctcaaagccggcggacactttcgcatggggccgctcgagctgaccgattttatcggtcaggacatcaactatcaggtcagccggcaaatttggcaggacatgcagtacgatccgcgctataccccgggccatctgcagcgctcgctggtcgatgccggtctgttgggcaaaaagaacggccgctcctatttttccgccgaagaatctcccccgccgcttgcggccgccgtcgatgcggaggtcgaggcgctacgcatttacggtgaacatcctctctttaccctgctacagcagcgggccgccctgcaatggccgcggctgcgcgtggaacaacggccgacattaccgggcttgggcgccgccattcaggtcaatgacgctttcaccgtcagcgttaccgatggccgcacggcaaaccagcttgccgaacagaccgcggcggacgcctttgtcgtcgatgtcgccctgaactacggcgatacggcgtacctggtggcggcgcatagccgccacgcctctgcggccaataaggcgctgtttttacgcctgctgcacaccgcgatcccgcaggtggaatttatcaaggattccccggccctgatcgtcgcccgcgtgctcagcagcctgatcaacgagtcggtgatcatggtggaaagcggcgtctgcagccgggaagacattgatgtcgccgccgtcgccggcgtgaactacgccgacggtattttcggctggctcactcacctcggggaggaaaatgtcaggacgacgctgagcaacctggcgcaattactccacgcggcgcgctatgcgccgcattacacccttctgcacgccgcccaaccggcgctgaccaccacgccttaa

SEQ ID NO: 165 - DNA, 1530 bp, Serratia plymuthica AS9
atggcagagaataattcggcaatccgttcagccgccgttattggtgcgggaaccatgggcagaggcatcgcctatctcctggcgctgaacggcatacgaaccgtactttataatcgcaatggtaataatctcaatcaggcccgtgactatattgtcagtgacctggacagaaaaatggataacggaaaaataaccctgcagaaaaaaggccagatattagccaatattattttctcggccgtctttgacgccataaccgacagcgatctggtgattgaaaccattgcggaagatgagcaaaccaagcatgaaatcctggcagccattgcggctacggtaaaaccagaggcgatcattgcgaccaatacctcctcgttgtcgctgaacaaactggcggcgggggtggaaaacaatccgcgctttatcggcctgcattttttcaatccggcgccgctgatgaagttgatcgaaatcattccctcttattttacctcccacaccaccagcctacgctgccagcagttggtaatagcgttgggtaaacagtttgtggtctgcaaagccacgccgggctttattgttaatcgcatggcgcgacctttctatctggaagggttccggctgctggaggaaaacgtggcacaggctccacagatcgaccgcgccctcaaggcaggcgggcattttcgcatggggcccttagaactgactgattttattggccaggatatcaactatcaggtcagcaagcagatttggcaggatatgcagttcgactcccgctatacccccggccatttgcaacgctcgctggtggatgccgggctgctggggaggaagaacgggcgctctttttttgcttccctaccggctacaccgcccaccccggccacagagagcgacacaccaacttcactgcatttttatggtgaacacgctttattcgatcacctgcaacagcgcgctttggccacctggcctgcgctgcgcgttcagcggttgccggaacggccggaactggggcgtcttatcctggtgaataacacgctggcgatcaaaatcaccgatggcagaacggcgaacctgctcgccggcttaaccgctctcgacaccttcgtgattgacgctgcgctgaattacgccgacaccgcctatctggtggccgcccacaatcagcatgccacagaggcgaataaagcgctgtttctgtcgctgctgcaaaccgtcatcgctcaggtagagtttattaaagattcccctgccctgatcgttgcccgcgtactgagcagcctgatcaacgaatcggtgatcatggtggagagcggcgtttgcagccgggcggatatcgatatcgccgccgtggccggcgtgaactatgccgacggcatttttgcctggctggcgcagctcgggcagaaaaacgtgaagtcgacgctggataacatggcgcaattgctgcactccgcgcgctattacccgcattactcattgctgaacgcggcccggcctgagctggctgtagcgccctaa

SEQ ID NO: 166 - DNA, 1530 bp, Serratia plymuthica tumat 205
atggcagagaataattcggcaatccgttcagccgccgttattggtgcggggactatgggcagaggcatcgcctacctcttggcactgaacggcatacgaaccgtactttataatcgcaatggtaataatctcaatcaggcccgtgactatattgtcagcgacctggacagaaaaatagataacggaaaaataaccctgcagaaaaaaggccagatattagccaatattattttctcggccgtctttgacgccataaccgacagcgatctggtgattgaaaccattgcggaagatgagcaaaccaagcatgaaatcctggcagccattgcggctacggtaaaaccggaggcgatcattgcgaccaatacctcctcgttgtcgctgaacaaactggcggcaggggtggaaaacaacccgcgctttatcggcctgcattttttcaatccggcgccgctgatgaagttgatcgaaatcattccctcttattttacctcccacgccaccagcctacgctgccagcagttggtaatagcattgggtaaacagtttgtggtctgcaaagccacaccgggctttattgttaatcgcatggcgcggcctttctatctggaagggttccggctgctggaggaaaacgtggcgctggcgccacagatcgaccgcgccctcaaggccggcgggcattttcgcatggggcctttagaactgacggattttatcggtcaggatatcaactaccaggtcagcaagcagatttggcaggatatgcagttcgaccctcgctatacccctggtcatttgcaacgctcgctggtggatgccgggctgctggggaggaaaaacgggcgctctttttttgcttcccaaccggtgacgccacccaccccgaccacagagagcgacacgccaacttcactgcatttttatggggagcatgctttattcgatcatctgcaacagcgtgctctggccacctggcctgcgctgcgcgttcagcggttgccggaacggcctgaactggggcgatttatcctggtgaataacgcgatggcgatcaaaatcaccgatggcagaacggcaaacctgctcgccggcttaaccgctctcgacaccttcgtgattgacgctgcgctgaattacgccgacaccgcctatctggtggccgcccacaatcaacatgccacagagacgaataaagcgctgtttctgacgctgctgcaaaccgtcatcgctcaggtggagtttattaaagattcccctgctctgatcgttgcccgcgtactgagcagcctgatcaatgaatcggtgatcatggtggagagcggcgtttgcagccgggcagatatcgatatcgccgccgtggccggcgtgaactatgccgacggcatttttgcctggttggcgcagctcgggcagaaaaacgtgaaatcgacgctggataacatggcgcaactgctgcactccgcgcgctattacccgcattactcattgctgaacgcggcccggcctgagctggccgtagcgccctaa

SEQ ID NO: 167 - DNA, 1530 bp, Serratia plymuthica A30
atggcagagaataattcggcaatccgttcagccgccgttattggtgcggggaccatgggcagaggcatcgcctacctcctggcactgaacggcatacgaaccgtactttataatcgcaatggtaataatctcaatcaggcccgtgactatattgtcagcgacctggacagaaaaatagataacggaaaaataaccctgcagaaaaaaggccagatattagccaatattattttctcggccgtctttgacgccataaccgacagcgatctggtgattgaaaccattgcggaagatgagcaaaccaagcatgaaatcctggcagccattgcggctacggtaaaaccggaggcgatcattgcgaccaatacctcctcgttgtcgctgaacaaactggcggcaggggtggaaaacaacccgcgctttatcggcctgcattttttcaatccggcgccactgatgaagttgatcgaaatcattccctcttattttacctcccacgccaccagcctacgctgccagaagttggtaatagcattgggtaaacagtttgtggtctgcaaagccacgccgggctttattgttaatcgcatggcgcggcctttctatctggaagggttccggctgctggaggagaacgtggcgctggcgccacagatcgaccgcgccctcaaggccggcgggcattttcgcatggggcctttagaactgacggattttatcggccaggatatcaactaccaggtcagcaagcagatttggcaggatatgcagttcgaccctcgctatacccctggtcatttgcaacgctcgctggtggatgccgggctgctggggaggaaaaacgggcgctctttttttgcttcccaaccggcgacgccgcccaacccgaccactgagggcgacacgccaacttcactgcatttttatggtgaacacgctttattcgatcacctgcaacagcgcgctttggccacctggcctgcgttgcgcgttcagcggttgccggaacggccggaactggggcgttttatcctgatgaataacaggctggcgatcaaaatcactgatggcagaacggcgaacctgctcgccggcttaaccgctctcgacaccttcgtgattgacgccgcgctgaactacgccgacaccgcctatctggtggccgcccacaatcaacatgccacagagacgaataaagcgctgtttctgacgctgctgcaaaccctcatcgctcaggtggagtttattaaagattcccctgccctgatcgttgcccgcgtactgagcagcctgatcaatgaatcggtgatcatggtggagagcggcgtttgcagccgggcagatatcgatatcgccgccgtggccggcgtgaactatgccgacggtatttttgcctggttggcgcagctcgggcagaaaaacgtgaaatcgacgctggataacatggcgcaactgctgcactccgcgcgctattacccgcattactcattgctgaacgcggcccggcctgagctggccgtagcgccctaa

SEQ ID NO: 168 - DNA, 1530 bp, Serratia plymuthica 4Rx13
atggcagagaataattcggcaatccgttcagccgccgttattggtgcggggaccatgggcagaggcatcgcctacctcctggcgctgaacggcatacgaaccgtactttataatcgcaatggtaatagtctcaatcaggcccgtgactatattgtcagcgacctggacagaaaaatagataacggaaaaataaccctgcagaaaaaaggccagatattagccaatattattttctcggccgtctttgacgccataaccgacagcgatctggtgattgaaaccattgcggaagatgagcaaaccaagcatgaaatcctggcagccattgcggctacggtaaaaccggaggcgatcattgcgaccaatacctcctcgttgtcgctgaacaaactggcggcaggggtggaaaacaacccgcgctttatcggcctgcattttttcaatccggcgccgctgatgaagttgatcgaaatcattccctcttattttacctcccacgccaccagcctacgctgccagaagttggtaatagcattgggtaaacagtttgtggtctgcaaagccacgccgggctttattgttaatcgcatggcgcggcctttctatctggaagggttccggctgctggaggagaacgtggcgctggcgccacagatcgaccgcgccctcaaggccggcgggcattttcgcatggggcctttagaactgacggattttatcggtcaggatatcaactaccaggtcagcaagcagatttggcaggatatgcagttcgaccctcgctatacccccggccacttgcaacgctcgctggtggatgccgggctgctggggaggaaaaacgggcgttctttttttgcttcccaaccggcgacgccacccaccccgaccacagagagcgacacgccaacttcactgcatttttatggtgagcacgctttattcgatcatctgcaacagcgcgctctggccacctggcctgcgctgagcgttcagcggttgccggaacggcctgaactggggcgatttatcctggtgaataacgcgctggcgatcaaaatcaccgatggcagaacggcaaacctgctcgccggcttaaccgctctcgacaccttcgtgattgacgctgcgctgaattacgccgacaccgcctatctggtggccgcccacaatcaacatgccacagagacgaataaagcgctgtttctgacgctgctgcaaaccgtcatcgctcaggtggagtttattaaagattcccctgccctgatcgttgcccgcgtactgagcagcctgatcaatgaatcggtgatcatggtggagagcggcgtttgcagccgggcagatatcgatatcgccgccgtggccggcgtgaactatgccgacggcatttttgcctggttggcgcagctcgggcagaaaaacgtgaaatcgacgctggataacatggcgcaactgctgcattccgcgcgctattacccgcattactcattgctgaacgcggcccggcctgagctggccgtagcgccctaa

SEQ ID NO: 169 - DNA, 1530 bp, Serratia plymuthica V4
atggcagagaataattcggcaatccgttcagccgccgttattggtgcggggaccatgggcagaggcatcgcctacctcctggcactgaacggcatacgaaccgtactttataatcgcaatggtaataatctcaatcaggcccgtgactatattgtcagcgacctggacagaaaaatagataacggaaaaataacccttcagaaaaaaggccagatattagccaatattattttctcggccgtctttgacgccataaccgacagcgatctggtgattgaaaccattgcggaagatgagcaaaccaagcatgaaatcctggcagccattgcggctacggtaaaaccggaggcgatcattgcgaccaatacctcctcgttgtcgctgaacaaactggcggcaggggtggaaaacaacccgcgctttatcggcctgcattttttcaatccggcgccgctgatgaagttgatcgaaatcattccctcttattttacctcccacgccaccagcctacgctgccagaagttggtaatagcattgggtaaacagtttgtggtctgcaaagccacgccgggctttattgttaatcgcatggcgcggcctttctatctggaagggttccggctgctggaggaaaacgtggcgctggcgccacagatcgaccgcgccctcaaggccggcgggcattttcgcatgggccctttagaactgacggattttatcggccaggatatcaactaccaggtcagcaagcagatttggcaggatatgcagttcgaccctcgctatacccctggtcatttgcaacgctcgctggtggatgccgggctgctggggaggaaaaacgggcgctctttttttgcttcccaaccggcgacgccacccaccccgaccacagagagcgacacgccaacttcactgcatttttatggtgaacacgctttattcgatcacctgcaacagcgcgctttggccacctggcctgcgttgcgcgttcagcggttgccggaacggccggaactggggcgttttatcctggtgaataacaggctggcgatcaaaatcaccgatggcagaacggcaaacctgctcgccggcttaaccgctctcgacaccttcgtgattgacgctgcgctgaattacgccgacaccgcctatctggtggccgcccacaatcaacatgccacagagacgaataaagcgctgtttctgacgctgctgcaaaccgtcatcgctcaggtggagtttattaaagattcccctgccctgatcgttgcccgcgtactgagcagcctgatcaatgaatcggtgatcatggtggagagcggcgtttgcagccgggcagatatcgatatcgccgccgtggccggcgtgaactatgccgacggtatttttgcctggttggcgcagctcgggcagaaaaacgtgaaatcgacgctggataacatggcgcaactgctgcactccgcgcgctattacccgcattactcattgctgaacgcggcccggcctgagctggccgtagcgccctaa

SEQ ID NO: 170 - DNA, 1530 bp, Serratia plymuthica 3Rp8
atggcagagaataattcggcaatccgttcagccgccgttattggtgcggggaccatgggcagaggcatcgcctacctcctggcactgaacggcatacgaaccgtactttataatcgcaatggtaataatctcaatcaggcccgtgactatattgtcagcgacctggacagaaaaatagataacggaaaaataaccctgcagaaaaaaggccagatattagccaatattattttctcggccgtctttgacgccataaccgacagcgatctggtgattgaaaccattgcggaagatgagcaaaccaagcatgaaatcctggcagccattgcggctacggtaaaaccggaggcgatcattgcgaccaatacctcctcgttgtcgctgaacaaactggcggcaggggtggaaaacaacccgcgctttatcggcctgcattttttcaatccggcgccgctgatgaagttgatcgaaatcattccctcttattttacctcccacgccaccagcctacgctgccagaagttggtaatagcattgggtaaacagtttgtggtctgcaaagccacgccgggctttattgttaatcgcatggcgcggcctttctatctggaagggttccggctgctggaggagaacgtggcgctggcgccacagatcgaccgcgccctcaaggccggcgggcattttcgcatggggcctttagaactgacggattttatcggccaggatatcaactaccaggtcagcaagcagatttggcaggatatgcagttcgaccctcgctatacccctggtcatttgcaacgctcgctggtggatgccgggctgctggggaggaaaaacgggcgctctttttttgcttcccaaccggcgacgccacccaccccgaccacagagagcgacacgccaacgtcactgcatttttatggtgaacacgctttattcgatcacctgcaacagcgcgctttggccacctggcctgcgttgcgcgttcagcggttgccggaacggccggaactggggcgttttatcctggtgaataacaggctggcgatcaaaatcaccgatggcagaacggcgaacctgctcgccggcttaaccgctctcgacaccttcgtgattgacgccgcgctgaactacgccgacaccgcctatctggtggccgcccacaatcaacatgccacagagacgaataaagcgctgtttctgacgctgctgcaaaccctcatcgctcaggtggagtttattaaagattcccctgctctgatcgttgcccgcgtactgagcagcctgatcaatgaatcggtgatcatggtggagagcggcgtttgcagccgggcagatatcgatatcgccgccgtggccggcgtgaactatgccgacggcatttttgcctggttggcgcagctcgggcagaaaaacgtgaaatcgacgctggataacatggcgcaactgctgcactccgcgcgctattacccgcattactcattgctgaacgcggcccggcctgagctggccgtagcgccctaa

SEQ ID NO: 171 - DNA, 1530 bp, Serratia proteamaculans MFPA44A14
atggcagagaataattcggcaatccattcggtcgctgttattggtgccggaaccatgggcagaggtattgcctatcttctggcgcagaacggcatacgaaccctgctttataatcgtagcggtaataatctggatcaggcccgcgactatattatccgtgacctggataagaaaatagacaacgggaaaataagcccacagaaaaaaggcgaagtattggccaacctggttttctctcccattttcgatgctatcgccgacagcgacctggtgattgaaaccatcgcggagcatgagaccaccaagcatgaaatcctcgcggcgattgcggccacggtgaaacaagaggccattatcgccaccaacacctcatcgctgtcgttgaataagctggcggcaggcgtcgaaaacaacgcccgttttatcggcctgcacttcttcaatccggccccgctgatgaaactgatcgagattattccgtcctattttaccagccgggccaccagcctgcgctgccagcagttggtgacggcgctaggcaaacagtttgtggtctgcaaagccacgccgggttttatcgtcaaccggatggcacggcctttttatctggaaggattccggctgttggaagaaaacgtggcattagcaccgcagatcgaccgcgccctcaaggccggtggccactttcgcatgggccctttggagctgaccgactttatcggccaggatattaactatcaggtcagcagccagatttggcaggacatgcaatacgacccccgctatacccccggtcatttgcaacgttcgctggtggatgccgggttgctggggaagaaaaacggccgatccttttttgctgccccttctgccgaatccaacctcctcgacgcaggcaacggtacgctgacttccctgcatttttatggcgaacataccctgtttgacctgctgcaacagcgcgccttggctacttggccaacgctgcagattattcaccagccggaacggccaacgctgggacgctttatccgggtgaatgacgcattggccgtcaaaatcaccgacggccgcaccgccaatctgctcgctgaattgaccgatctcgacacctttgtgatcgacgccgcactgaattacagcgataccacctatctggtggccgcccacaatcaggacgccgccgaggccaataaagcgctgtttctgtcgctgctgcaaacgttgatcccgcaggtggagtttattaaagactctccaggcctgatcgtcgcccgggttctgagcagtctgatcaatgagtcggtgatcatggtggagagcggggtttgcagccgggcagatatcgatattgccgccgtggcgggcgttaactatgccgatggcatctttgcctggctgacgcagctcgggcaaaaaaacgtgaaatcaacgctggataatatggcgcaactgctgcattccgcccgctattacccgcattactcattgctgaatatcccccggcccgagctggccgtcgcgccgtaa

SEQ ID NO: 172 - DNA, 1530 bp, Serratia plymuthica A153
atggcagagaataattcggcaatccgttcagccgccgttattggtgcggggaccatgggcagaggcatcgcctatctcctggcgctgaacggcatacgaaccgtactttataatcgcaatggtaataatctcaatcaggcccgtgactatattgtcagcgacctggacagaaaaatagataacggaaaaataaccctgcagaaaaaaggccagatattagccaatattattttctcggacgtctttgacgccataaccgacagcgatctggtgattgaaaccattgcggaagatgagcaaaccaagcatgaaatcctggcagccattgcggcgacggtaaaaccggaggcgatcattgcgaccaatacttcctcgctgtcgctgaacaaactggcggcgggggtggaaaacaacccgcgctttatcggcctgcattttttcaatccggcgccgctgatgaagttgatcgaaattattccctcttatttcacctctcgcgccaccagtctacgctgccagcagttggtaacagcgttgggtaaactgtttgtggtctgcaaagccacgccgggctttattgttaatcgcatggcgcggcctttctatctggaagggttccggctgctggaggaaaacgtggcgctggctccacagatcgaccgcgccctcaaggccggcgggcattttcgcatggggcctttagaactgactgattttatcggccaggatatcaactatcaggtcagcaaacagatttggcaggatatgcagttcgatccccgctatacccccggccatttgcaacgctcgctggtggatgccgggctgctggggaggaaaaacgggcgctctttttttgcttcccaacctgctacaccgcccaacccgaccactgagggccacacgccaacttcactgcttttttatggtgaacacgctttattcgatcacctgcaacagcgcgctttggccacctggcctgcgctgcgcgttcagcggttgccggaacggccggaactgggacgttttatcctggtgaataacaggctggcgatcaaaatcaccgatggcagaacggcgaacctgctcgccggcttaaccgctctcgacaccttcgtgattgacgccgcgctgaactacgccgacaccgcctatctggtggccgcccacaatcaacatgccacagagccgaataaagcgctgtttctgacgctgctgcaaaccctcatcgctcaggtggagtttattaaagattcccctgccctgatcgttgcccgcgtactgagcagcctgatcaatgaatcggtgatcatggtggagagcggcgtttgcagccgggcagatatcgatatcgccgccgtggccggcgtgaactatgccgacggcatttttgcctggttggcgcagctcgggcagaaaaacgtgaaatcgacgctggataacatggcgcaattgctgcactccacgcgctattacccgcattactcattgctgaacgcggcccggcctgagctggctgtagcgccctaa

SEQ ID NO: 173 - protein, 24 aa, Artificial Sequence
  consensus sequence 1
  misc_feature (13)..(13): Xaa can be any naturally occurring amino acid
  misc_feature (15)..(17): Xaa can be any naturally occurring amino acid
  misc_feature (19)..(19): Xaa can be any naturally occurring amino acid
  misc_feature (21)..(21): Xaa can be any naturally occurring amino acid
GAGTMGRGIAYLXAXXXIXTXLYN

SEQ ID NO: 174 - DNA, 774 bp, Pseudomonas putida KT2440
atgccgcgatatatcgatgtgcaggcgcccgaacatggcgttcagctcattaccctgcaacggcccgaggccttgaatgccctgtgcaccgagctactggcagaactggccgctgcgctgcaggctgccgggaacgacgagcatgtccgtgccacagtgattaccggcagcgccaaggcattcgccgcaggcgccgacatccgcgagatggccgatcgcgacctggtcggcatcctcaatgacccgcgcgtagcgcattggcaaagcatcgccgcattcgccaaaccgctgattgctgcagtcaacggctatgccctgggtggcggttgcgaactggcaatgtgcgccgacatcgtcatcgccagtaccgacgcccgtttcggccagccggaaatcaaccttggcatcatccccggtgctggcggcacccagcgcctgttacgtgccgtcggtaagccgttggccatgcagatggtgctgacgggggaagccatcactgccctccgcgcccagcaggccggcctggtcagcgaaatcacccagcccgaactcaccgtagaacgcgccatgcaggttgcccgcagcatcgccgccaaagcgccgctggctgtgcgcctggccaaggaggcgttactgaaggccggtgataccgacctggccagcggcctgcgcttcgagcgccatgccttcaccctgctggcgggcaccgccgaccgcgatgaaggcatccgcgccttccaggaaaagcgccaggcccgcttccaagggcgctga

SEQ ID NO: 175 - DNA, 696 bp, Pseudomonas putida KT2440
ttgatcaataaaacgtacgagtccatcgccagcgcggtggaagggattaccgacggttcgaccatcatggtcggtggcttcggcacggctggcatgccgtccgagctgatcgatggcctcattgccaccggtgcccgcgacctgaccatcatcagcaacaacgccggcaacggcgagatcggcctggccgccctgctcatggcaggcagcgtgcgcaaggtggtctgctcgttcccgcgccagtccgactcctacgtgttcgacgaactgtaccgcgccggcaagatcgagctggaagtggtcccgcagggcaacctggccgagcgtatccgcgccgcaggctccggcattggtgcgttcttctcgccaaccggctacggcaccctgctggccgagggcaaggaaacccgtgagatcgatggccgcatgtacgtgctggaaatgccgctgcacgccgacttcgcactgatcaaggcgcacaagggtgaccgttggggcaacctgacctaccgcaaggccgcccgcaacttcggcccgatcatggccatggctgccaagaccgccatcgcccaggtcgaccaggtcgtcgaactcggtgaactggacccggaacacatcatcaccccgggtatcttcgtccagcgcgtggtcgccgtcaccggtgctgccgcttcttcgattgccaaagctgtctga

SEQ ID NO: 176 - DNA, 642 bp, Pseudomonas putida KT2440
atgaccatcaccaaaaagctctcccgcaccgagatggcccaacgcgtggccgcagacatccaggaaggcgcgtacgtaaacctgggcatcggcgcaccgaccctggtggccaactacctgggcgacaaggaagtgttcctgcacagcgagaacggcctgctgggcatgggcccaagccctgcgccgggcgaggaagacgatgacctgatcaacgccggcaagcagcacgtcaccctgctgaccggtggtgccttcttccaccatgccgattcgttctcgatgatgcgtggcggccacctggacatcgctgtactgggcgccttccaggtgtcggtcaagggcgacctggccaactggcacacgggtgccgaaggctcgatcccggccgtaggcggtgcaatggacctggccaccggcgcccgccaggtgttcgtgatgatggaccacctgaccaagaccggcgaaagcaagctggtgcccgagtgcacctacccgctgaccggtatcgcttgcgtcagccgcatctacaccgacctggccgtactggaagtgacacctgaagggctgaaagtggtcgaaatctgcgcggacatcgactttgacgagctgcagaaactcagtggcgtgccgctgatcaagtga

SEQ ID NO: 177 - DNA, 774 bp, Pseudomonas putida KT2440; identical to SEQ ID NO: 174

SEQ ID NO: 178 - protein, 470 aa, Escherichia coli str. K-12 substr. MG1655
MKKTKIVCTIGPKTESEEMLAKMLDAGMNVMRLNFSHGDYAEHGQRIQNLRNVMSKTGKTAAILLDTKGPEIRTMKLEGGNDVSLKAGQTFTFTTDKSVIGNSEMVAVTYEGFTTDLSVGNTVLVDDGLIGMEVTAIEGNKVICKVLNNGDLGENKGVNLPGVSIALPALAEKDKQDLIFGCEQGVDFVAASFIRKRSDVIEIREHLKAHGGENIHIISKIENQEGLNNFDEILEASDGIMVARGDLGVEIPVEEVIFAQKMMIEKCIRARKVVITATQMLDSMIKNPRPTRAEAGDVANAILDGTDAVMLSGESAKGKYPLEAVSIMATICERTDRVMNSRLEFNNDNRKLRITEAVCRGAVETAEKLDAPLIVVATQGGKSARAVRKYFPDATILALTTNEKTAHQLVLSKGVVPQLVKEITSTDDFYRLGKELALQSGLAHKGDVVVMVSGALVPSGTTNTASVHVL

SEQ ID NO: 179 - protein, 480 aa, Escherichia coli str. K-12 substr. MG1655
MSRRLRRTKIVTTLGPATDRDNNLEKVIAAGANVVRMNFSHGSPEDHKMRADKVREIAAKLGRHVAILGDLQGPKIRVSTFKEGKVFLNIGDKFLLDANLGKGEGDKEKVGIDYKGLPADVVPGDILLLDDGRVQLKVLEVQGMKVFTEVTVGGPLSNNKGINKLGGGLSAEALTEKDKADIKTAALIGVDYLAVSFPRCGEDLNYARRLARDAGCDAKIVAKVERAEAVCSQDAMDDIILASDVVMVARGDLGVEIGDPELVGIQKALIRRARQLNRAVITATQMMESMITNPMPTRAEVMDVANAVLDGTDAVMLSAETAAGQYPSETVAAMARVCLGAEKIPSINVSKHRLDVQFDNVEEAIAMSAMYAANHLKGVTAIITMTESGRTALMTSRISSGLPIFAMSRHERTLNLTALYRGVTPVHFDSANDGVAAASEAVNLLRDKGYLMSGDLVIVTQGDVMSTVGSTNTTRILTVE

SEQ ID NO: 180 - protein, 470 aa, Serratia grimesii NBRC13537
MKKTKIVCTIGPKTESEEMLTNLLNAGMNVMRLNFSHGDYEEHGNRIKNMRAVMAKTGQNAGILLDTKGPEIRTMKLEGGKDAALVAGQTFTFTTDQSVIGNNERVAVTYAGFSADLKIGNTVLVDDGLIGMEVTNVTENEVVCKVLNSGDLGENKGVNLPGVSIQLPALAEKDKRDLIFGCEQGVDFVAASFIRKRSDVLEIREHLKAHGGEQIQIISKIENQEGLNNFDEILEASDGIMVARGDLGVEIPVEEVIFAQKMMIEKCNRARKVVITATQMLDSMIKNPRPTRAEAGDVANAILDGTDAVMLSGESAKGKYPLEAVTIMATICERTDRVMPSRIDSLNDNRKLRITEAVCRGAVETAEKLDAPLIVVATSGGKSAKSVRKYFPNAVILALTTNEVTAHQLILSKGVIPQMVKEIASTDDFYRIGKEAALASGLAQKGDVVVMVSGALVPSGTTNTASVHVL

SEQ ID NO: 181 - protein, 480 aa, Serratia grimesii NBRC13537
MSRRLRRTKIVTTLGPATDRDNNLEKIIAAGANVVRLNFSHGSAEDHQARADKVREIAAKLGRHVAILGDLQGPKIRVSTFKEGKIFLNIGDKFLLDANMSKGEGDKEKVGIDYKGLPADVVPGDVLLLDDGRVQLKVLEVQGMKVFTEVTVGGPLSNNKGINKLGGGLSAEALTEKDKADIVTAAKIGVDYLAVSFPRTGEDLNYARRLARDAGCNAKIVSKVERAEAVCSDEAMDDIILASDVVMVARGDLGVEIGDPELVGIQKKLIRRARTLNRAVITATQMMESMITNPMPTRAEVMDVANAVLDGTDAVMLSAETAAGQYPAETVAAMARVCLGAEKIPSINVSKHRLDVQFDNIEEAIAMSSMYAANHLKGVTALIAMTESGRTALMMSRISSGLPIFAMSRHEHTLNLTALYRGVTPVYFDSHEDGVIAANDAVNRLRDKGFLVSGDLVIVTQGDVMETVGTTNTSRILRVE

SEQ ID NO: 182 - protein, 540 aa, Escherichia coli str. K-12 substr. MG1655
MRVNNGLTPQELEAYGISDVHDIVYNPSYDLLYQEELDPSLTGYERGVLTNLGAVAVDTGIFTGRSPKDKYIVRDDTTRDTFWWADKGKGKNDNKPLSPETWQHLKGLVTRQLSGKRLFVVDAFCGANPDTRLSVRFITEVAWQAHFVKNMFIRPSDEELAGFKPDFIVMNGAKCTNPQWKEQGLNSENFVAFNLTERMQLIGGTWYGGEMKKGMFSMMNYLLPLKGIASMHCSANVGEKGDVAVFFGLSGTGKTTLSTDPKRRLIGDDEHGWDDDGVFNFEGGCYAKTIKLSKEAEPEIYNAIRRDALLENVTVREDGTIDFDDGSKTENTRVSYPIYHIDNIVKPVSKAGHATKVIFLTADAFGVLPPVSRLTADQTQYHFLSGFTAKLAGTERGITEPTPTFSACFGAAFLSLHPTQYAEVLVKRMQAAGAQAYLVNTGWNGTGKRISIKDTRAIIDAILNGSLDNAETFTLPMFNLAIPTELPGVDTKILDPRNTYASPEQWQEKAETLAKLFIDNFDKYTDTPAGAALVAAGPKL

SEQ ID NO: 183 - protein, 539 aa, Serratia grimesii NBRC13537
MRVKGITPQDLAAYGIHNVGEIVHNPSYDLLFKEETDPSLEGFERGVVTKLGAVSVDTGIFTGRSPKDKYIVRDDITRDTVWWADQGKGKNDNKPLSPEIWADLKQLVTTQLSGKRLFVMDTFCGANADSRLKVRFITEVAWQAHFVKNMFIRPTDEELQDFEPDFVVMNGAKCTNPNWQQQGLNSENFVAFNLTERMQLIGGTWYGGEMKKGMFSIMNYLLPLKGIASMHCSANVGEKGDVAVFFGLSGTGKTTLSTDPKRQLIGDDEHGWDDDGVFNFEGGCYAKTIKLSEEAEPDIYHAIKRDALLENVVVLADGTIDFNDGSKTENTRVSYPIYHIQNIVKPVSKAGHATKVIFLTADAFGVLPPVSRLTANQTQYHFLSGFTAKLAGTERGVTEPTPTFSACFGAAFLSLHPTQYAEVLVKRMQAAGAQAYLVNTGWNGTGKRISIKDTRGIIDAILSGEIDKAETITLPIFDLAMPTSLPGVNPDILDPRATYASLEQWQEKAQDLAERFVTNFDKYTDTPAGAALVSAGPKL

SEQ ID NO: 184 - protein, 539 aa, Serratia grimesii NBRC13537
MSSIAITPQTLARYGIHQATEIVHNPSYEQLFTEETRADLPALERGTLTTLGAVNVDTGEFTGRSPKDKYIVRDDTTRDTVWWSDNGTGKNDNQPLSPEIWQHLKTLVGNQLSGKRLFVVDAFCGANADTRLKVRFITEVAWQAHFVKNMFIRPTDEELQNFEPDFVVMNGAKCTNPDWQQQGMHSENFVTFNLTERMQLIGGTWYGGEMKKGLFSIMNYLLPLQGIASMHCSANVGEQGDVAVFFGLSGTGKTTLSTDPKRQLIGDDEHGWDDDGVFNFEGGCYAKTIKLSQQAEPEIYQAIRRNALLENVQVLADGSIDFDDASKTENTRVSYPIDHIENIVKPVSKAGHAKKIIFLTADAFGVLPPVSRLTPEQTQYHFLSGFTAKLAGTERGITTPTPTFSACFGAAFLTLHPTQYAEVLVKRMEAAGAQAYLVNTGWNGSGKRISIKDTRGIIDAILNGEIEHAETFTLPIFGLAVPTALPGVDPSILDPRKTYADESLWQEKAQDLAQRFIDNFAKYTVTPAGEKLVGAGPKL

SEQ ID NO: 185 - protein, 477 aa, Serratia grimesii NBRC13537
MFKNAFANLQKVGKSLMLPVSVLPIAGILLGVGSANFSWLPAVVSHVMAEAGGSVFANMPLIFAIGVALGFTNNDGVSALAAVVAYGIMVKTMAVVAPLVLHLPAEEIAAKHLADTGVLGGIISGSIAAYMFNRFFRIQLPEYLGFFAGKRFVPIISGLAAIVLGVVLSFIWPPIGTAIQTFSQWAAYQNPVVAFGIYGVVERALVPFGLHHIWNVPFQMQIGEYTNAAGQVFHGDIPRYMAGDPTAGKLSGGFLFKMYGLPAAAIAIWHSAKPENRAKVGGIMISAALTSFLTGITEPIEFSFMFVAPILYAIHAILAGLAFPICILLGMRDGTSFSHGLIDFIVLSGNSSKIWLFPIVGIIYGLVYYTIFRVLIAKLDLKTPGREDTVSEQVAQGGSEMSAALVQAFGGKENITNLDACITRLRVSVADVSKVDQAGLKKLGAAGVVVAGSGVQAIFGTKSDNLKTDMDEYIRNH

SEQ ID NO: 186 - DNA, 200 bp, Escherichia coli str. K-12 substr. MG1655
cgtaattgccctttaaaattcggggcgccgaccccatgtggtctcaagcccaaaggaagagtgaggcgagtcagtcgcgtaatgcttaggcacaggattgatttgtcgcaatgattgacacgattccgcttgacgctgcgtaaggtttttgtaattttacaggcaaccttttattcactaacaaatagctggtggaatat

SEQ ID NO: 187 - DNA, 30 bp, Artificial Sequence
  primer
taccgtcgacctcgacgtaattgcccttta

SEQ ID NO: 188 - DNA, 41 bp, Artificial Sequence
  primer
ggccccccctcgagtcattaagtactatattccaccagcta

SEQ ID NO: 189 - DNA, 774 bp, Pseudomonas putida KT2440; identical to SEQ ID NO: 174

SEQ ID NO: 190 - DNA, 32 bp, Artificial Sequence
  primer
ctggtggaatatatgcacgacgtattcatctg

SEQ ID NO: 191 - DNA, 41 bp, Artificial Sequence
  primer
ctcgagtcattaagtgttaactcaaacccgctcgatggcca

SEQ ID NO: 192 - DNA, 696 bp, Pseudomonas putida KT2440; identical to SEQ ID NO: 175

SEQ ID NO: 193 - DNA, 642 bp, Pseudomonas putida KT2440; identical to SEQ ID NO: 176

SEQ ID NO: 194 - DNA, 55 bp, Artificial Sequence
  primer
gagcgggtttgagttcaattgtagctggtggaatatttgatcaataaaacgtacg

SEQ ID NO: 195 - DNA, 34 bp, Artificial Sequence
  primer
gagtcattaagtgtttcacttgatcagcggcacg

SEQ ID NO: 196 - DNA, 35 bp, Artificial Sequence
  primer
ctggtggaatatagtactatggcagaaagtaatgc

SEQ ID NO: 197 - DNA, 39 bp, Artificial Sequence
  primer
ttccaccagctaagtgctagcttaaggcgtggtcgtcag

SEQ ID NO: 198 - DNA, 35 bp, Artificial Sequence; identical to SEQ ID NO: 196
  primer

SEQ ID NO: 199 - DNA, 39 bp, Artificial Sequence; identical to SEQ ID NO: 197
  primer

SEQ ID NO: 200 - DNA, 35 bp, Artificial Sequence
  primer
ctggtggaatatagtactatggcagagaataattc

SEQ ID NO: 201 - DNA, 39 bp, Artificial Sequence
  primer
ttccaccagctaagtgctagcttagggcgctacagccag

SEQ ID NO: 202 - DNA, 35 bp, Artificial Sequence; identical to SEQ ID NO: 200
  primer

SEQ ID NO: 203 - DNA, 38 bp, Artificial Sequence
  primer
ttccaccagctaagtgctagcttagggcgcgacggcca

SEQ ID NO: 204 - DNA, 35 bp, Artificial Sequence; identical to SEQ ID NO: 196
  primer

SEQ ID NO: 205 - DNA, 40 bp, Artificial Sequence
  primer
ttccaccagctaagtgctagcttaaggcgtggtggtcagc

SEQ ID NO: 206 - DNA, 35 bp, Artificial Sequence; identical to SEQ ID NO: 200
  primer

SEQ ID NO: 207 - DNA, 40 bp, Artificial Sequence
  primer
ttccaccagctaagtgctagcttacggcgcgacggccagt

SEQ ID NO: 208 - DNA, 35 bp, Artificial Sequence
  primer
ctggtggaatatagtactatggcagagaataatac

SEQ ID NO: 209 - DNA, 40 bp, Artificial Sequence
  primer
ttccaccagctaagtgctagctcatggcgcgacggccagc

SEQ ID NO: 210 - DNA, 40 bp, Artificial Sequence
  primer
cggccagtgaattcgagctccgtaattgccctttaaaatt

SEQ ID NO: 211 - DNA, 41 bp, Artificial Sequence
  primer
gatccccgggtaccgcatgctatattccaccagctatttgt

SEQ ID NO: 212 - DNA, 34 bp, Artificial Sequence
  primer
gctggtggaatatagatgccgcgatatatcgatg

SEQ ID NO: 213 - DNA, 34 bp, Artificial Sequence
  primer
attacgccaagcttgtcagcgcccttggaagcgg

SEQ ID NO: 214 - DNA, 1155 bp, Acinetobacter baylyi ADP1 dcaA
atgattcgcgatgaagggatgttgcaacaattactttcgacaatacgagattttgtaaaaaatgaattgattcctcgagagcatgaagttgcagaaaaggattgtattcctgaagatattattcagcaaatgcgagaactaggcctatttggtttaaccattcccgaagaatacggtggacttggaatcacaatggaagaagaggtgaatgtcgcgtttgaacttggtcagacatccccagcatttcgttcattgattggcacaaataatggcattggttcaagtggtttaatcattgatggaactgaggagcaaaaacagaaatatttgccacgttatgccagtggagaaattattggttcattttgcttaactgaaccagaagcgggttcagatgctgcctctttaaaaacgacagcggtaaaagatggtgatttctacatattaaatggaaccaagcgttttattaccaatgcaccgcatgcagcaacatttaccgtaatggcacgcaccaatccagcaattaaaggggcaggtggaatttctgcttttttggtagaagccaatacaccaggtatcacactaggcaaaatagatcagaaaatgggacaaaaaggctctcatacctgtgatgtgatttttgaaaattgtcgagtacctgcatctgcattaattggtggcgttgaaggcgttggttttaaaacagcaatgaaagtgctggataaaggccgtctacatattggtgcatatagtgtaggtgttgcagagcgtatgttgaatgatgcactacattatgctgtcgagcgtaagcagtttggtcaacccattgcaaattttcaattgattcaagccatgctggcagactctaaagccgaaatttatgcggctaaatgtatggttttggatgcagcacgtcgccgtgatgaaggccaaaatattagtacagaagcctcatgtgccaagatgtttgcaacagaaatgtgtggtcgagtcgcagatcgctgtgtgcaaattcatggtggggcaggttacatcagtgaatattcgattgagcgtttttatcgtgacgtgcgtttattccgtctttatgagggtacgacccaagttcagcaaattattattgccaaaaatatgattaaggaagtgacgtcctaa

SEQ ID NO: 215 - DNA, 50 bp, Artificial Sequence
  primer
gggcgctgacaagcttagctggtggaatatatgattcgcgatgaagggat

SEQ ID NO: 216 - DNA, 36 bp, Artificial Sequence
  primer
tgattacgccaagcttttaggacgtcacttccttaa

SEQ ID NO: 217 - DNA, 34 bp, Artificial Sequence
  primer
tatagggcgaattggcgtaattgccctttaaaat

SEQ ID NO: 218 - DNA, 40 bp, Artificial Sequence
  primer
ccgccaccgcggtggagctcatattccaccagctatttgt

SEQ ID NO: 219 - DNA, 1620 bp, Serratia grimesii NBRC13537
atgcgtgttaaaggtataacccctcaagatctggccgcttatgggattcataacgttggcgaaatcgttcacaacccaagttatgacttgctgtttaaggaagaaacagacccatctctggaaggttttgagcgtggggtcgtaaccaagctgggtgctgtatccgtcgacaccggtatttttaccggccgttccccgaaagataagtacatcgtccgtgacgacatcacccgcgacaccgtctggtgggccgatcagggtaaaggtaaaaacgataataaaccccttagcccggaaatttgggcagacctgaaacaactggtcaccacgcaactctccggcaaacgcctgtttgtgatggataccttctgcggtgccaatgctgactcccgtctgaaagtccgctttattaccgaggtcgcctggcaggcacacttcgttaaaaacatgttcatccgtccgaccgacgaagaactgcaggatttcgagccagacttcgttgtcatgaacggcgccaaatgcactaacccgaactggcagcaacagggcctgaactcggaaaactttgtcgccttcaacctgaccgaacgcatgcaactgattggcggtacctggtacggcggcgaaatgaaaaagggtatgttctccatcatgaactacctgttgccgctgaaaggcattgcctccatgcactgctcggccaacgtgggcgagaaaggcgacgtggcggtattcttcggcctgtccggcaccggcaaaaccaccctgtccaccgatccgaaacgccaactgattggcgatgacgaacacggctgggatgacgacggtgtgtttaacttcgaaggcggctgctacgcgaaaaccatcaagctgtctgaagaagccgaaccggatatctatcacgccatcaaacgcgatgcgctactggaaaacgttgttgttctggctgacggcacaatagatttcaatgatggttcgaaaaccgagaacacccgtgtttcctacccgatctatcacatccagaatatcgtaaaaccggtttccaaagcgggtcacgccaccaaggtgatcttcctgaccgcagacgctttcggtgtactgccgccggtatctcgcctgaccgctaaccagacccagtaccacttcctgtctggctttaccgccaaactggccggtaccgagcgcggcgtgacagagcctaccccaaccttctccgcctgcttcggcgcagccttcctgtcactgcacccaacgcagtacgctgaagtgctggtgaaacgcatgcaagctgccggcgcacaggcctatctggtgaacaccggctggaacggcaccggcaaacgcatctcgatcaaggatacccgcggcattatcgacgcgatcctcagcggtgaaatcgataaggcggaaaccattactctgcctatcttcgatctggcgatgccaacctcactgccgggtgttaacccggatatcctggatccacgcgccacttatgccagccttgagcaatggcaagagaaggcacaggatctggccgagcgttttgtcaccaactttgacaaatacaccgataccccggcaggtgccgcgttggtcagcgctggtccaaaactgtaa

SEQ ID NO: 220 - DNA, 34 bp, Artificial Sequence
  primer
agctggtggaatatgatgcgtgttaaaggtataa

SEQ ID NO: 221 - DNA, 40 bp, Artificial Sequence
  primer
ccgccaccgcggtggagctcttacagttttggaccagcgc

SEQ ID NO: 222 - DNA, 70 bp, Artificial Sequence
  primer
gctggttttattcgtttctttatccatcacaacttgtagaaaaatccgtcgtgtaggctggagctgcttc

SEQ ID NO: 223 - DNA, 70 bp, Artificial Sequence
  primer
aaacgccgcaaagcggcgtttttgacaaaagaattatgtcacgttttataatgggaattagccatggtcc

SEQ ID NO: 224 - DNA, 20 bp, Artificial Sequence
  primer
cggtgccctgaatgaactgc

SEQ ID NO: 225 - DNA, 20 bp, Artificial Sequence
  primer
cgccggtgaaaccgtcacga

SEQ ID NO: 226 - DNA, 20 bp, Artificial Sequence
  primer
gtgctgcgtcgtctttagct

SEQ ID NO: 227 - DNA, 70 bp, Artificial Sequence
  primer
gacgttatcgcaacaccaataatttgcttcaccagtcaacggagtaatacgtgtaggctggagctgcttc

SEQ ID NO: 228 - DNA, 70 bp, Artificial Sequence
  primer
cagtcaggttcagtgtgtgctcatgacgtgacatggcgaagataggcaggatgggaattagccatggtcc

SEQ ID NO: 229 - DNA, 20 bp, Artificial Sequence
  primer
tggtggaaatggcgcagctt

SEQ ID NO: 230 - DNA, 20 bp, Artificial Sequence
  primer
gcgtaaccgacccaattcga

SEQ ID NO: 231 - DNA, 67 bp, Artificial Sequence
  primer
gaaagcaagtttctcccatccttctcaacttaaagactaagactgtcgtgtaggctggagctgcttc

SEQ ID NO: 232 - DNA, 70 bp, Artificial Sequence
  primer
cgcccatcagggcgcttcgatatacaaattaattcacaaaagcaatattaatgggaattagccatggtcc

SEQ ID NO: 233 - DNA, 18 bp, Artificial Sequence
  primer
ccggatgaactttcactt

SEQ ID NO: 234 - DNA, 18 bp, Artificial Sequence
  primer
gagctgcgtcatctttag

SEQ ID NO: 235 - DNA, 70 bp, Artificial Sequence
  primer
ggatttcatgttcaagcaacacctggttgtttcagtcaacggagtattacgtgtaggctggagctgcttc

SEQ ID NO: 236 - DNA, 70 bp, Artificial Sequence
  primer
tgaactgtaggccggatgtggcgttttcgccgcatccggcaacgtacttaatgggaattagccatggtcc

SEQ ID NO: 237 - DNA, 18 bp, Artificial Sequence
  primer
acgcatgagttgtatgaa

SEQ ID NO: 238 - DNA, 18 bp, Artificial Sequence
  primer
ttacccgatcaggatcat

SEQ ID NO: 239 - DNA, 672 bp, Acinetobacter baylyi ADP1 dcaI
atgattaataaaatcattaatgatattgagcccattttaaaatcgattccagatggttcaacgattatgacaagtggttttggtacgacaggtcaacctgaggcactacttgaagcattaattgatttcgctccaaaagagttaactattatcaataataatgcttcatctggcccgaatggtttgactcagcttttcactgctggattggtcaaaaagctcatttgctcgtatccaaaatcaatcagttcgactgtttttccagatttatatcgtgcgggaaaaattgaacttgaactggttcctcagggaaatcttgcatgtcgtattcaagcagcaggtgctggtctgggagcggtatttacccccacaggctacgggaccaaaattgctgaaggcaaagaaacgcgcattattaacggtaaaaattatgtacttgaatatccacttgaagccgattatgcattcatttatgcagataaggcagatcgctgggggaatttaacttatcgtaaagccgccagaaattttggtccgattatggccaaagctgcaaaaacaacaattgctcaagtcaatcaaactgttgaattgggtgatcttgatcccgaatgcattattacacccgggatatttgtacagcatgtggtgcgattaggagatataaaatga

SEQ ID NO: 240 - DNA, 675 bp, Acinetobacter baylyi ADP1 dcaJ
atgacgattcagaaaagaagtcgagaagatatcgcaatcatgatagcaaaggatattcctgatggttcgtatgtcaatcttggaattggattaccaacccatgtcgcaaaatacttgccaaaagataaggaaatttttctgcactcagagaatggtgtactggcatttggtccacctcctgctgaaggtgaagaagatcaggacttagtcaatgcaggtaaagagctggtgactttactatcaggtggatgttttatgcatcatggagattcatttgacattatgcgtggtggacatctggatatttgcgttattggggcatttcaagtcgcgctcaatggtgatttggctaactggcatacaggtaaagacgatgatgtgcctgctgttgggggagcaatggatttggcggttggggccaagcgtatttttgtgtatatggaacataccaccaaaaaaggcgaacctaaaattgttaaacatctgacttatccaatcactggtgagcagtgtgttgatcgtatttatacagatttatgtacgattgagctgaaagatggacaggcatatgtgattgaaatggtcgacggattagattttgatactttgcaagccttaactgaatgcccattaattgatcactgtacttattcatcgttgattcagcttagataa

SEQ ID NO: 241 - DNA, 55 bp, Artificial Sequence
  primer
gagcgggtttgagttcaattgtagctggtggaatatatgattaataaaatcatta

SEQ ID NO: 242 - DNA, 34 bp, Artificial Sequence
  primer
gagtcattaagtgttttatctaagctgaatcaac

SEQ ID NO: 243 - DNA, 1434 bp, Serratia grimesii NBRC13537
atgttcaagaacgcatttgcaaacctgcaaaaagtaggtaagtcgctaatgctgccggtgtccgtattgcctatcgcaggtatcctgctgggcgtcggttccgccaactttagctggctacctgcggtagtctcccacgtgatggcggaagccggcggttctgttttcgccaatatgccgttaattttcgccatcggtgttgccctgggcttcaccaacaacgacggtgtatccgcactggctgcagtcgtggcttacggcatcatggtgaaaaccatggcggtggttgcacctttggtgctgcacttgccggctgaagagattgcggccaaacatttggcggataccggtgtgctcggggggattatctccggctccatcgctgcctatatgttcaaccgcttcttccgcattcaattgccggaatacctgggcttctttgcaggtaagcgttttgtgccgattatctccggcctggcggcgatcgttctgggcgtagtattgtccttcatctggcctccaatcggtacggctatccagaccttctcccagtgggctgcttatcagaacccggtagtggcgtttggtatttacggcgtggttgaacgtgcgctggtgccatttggtctgcaccatatctggaacgtaccgttccaaatgcagattggtgagtacaccaacgcagcaggtcaggtattccacggcgatatcccacgttatatggcgggtgacccaactgcgggtaaactgtccggtggcttcctgttcaaaatgtacggtctgcctgctgctgcgattgccatctggcactcagccaagccggaaaaccgcgctaaagtcggcggtatcatgatctccgctgccttgacctcgttcctgaccggtatcaccgaaccgatcgagttctcattcatgttcgtcgcgccgatcctgtacgcaatccatgccatcctggctggcctggcgttcccgatctgtatcctgctgggtatgcgtgacggcaccagcttctcacacggtttgatcgactttatcgtactgagcggtaacagcagcaaaatttggctgttcccaatcgtcggtatcatctacggtctggtgtactacaccatcttccgtgtgctgattgccaagctggatctgaaaaccccaggtcgcgaagacactgtttctgagcaggttgcacagggcggttctgaaatgtctgcggcgctggttcaggctttcggcggtaaagaaaacatcaccaacctggatgcctgtatcacccgtctgcgtgttagcgtggcggacgtgagcaaggttgaccaggctggcctgaaaaaactgggtgctgccggcgtagttgtcgcaggctctggtgttcaggctatctttggtaccaaatctgataacctgaaaacggatatggacgaatacatccgtaaccattaa

SEQ ID NO: 244 - DNA, 70 bp, Artificial Sequence
  primer
aagaatcgcggaaagtagcaaagcactattactcaggagcacactcaactgtgtaggctggagctgcttc

SEQ ID NO: 245 - DNA, 70 bp, Artificial Sequence
  primer
gccaataaaaaagggaggctttcgcctcccttaaaactcccctgcctgaaatgggaattagccatggtcc

SEQ ID NO: 246 - DNA, 20 bp, Artificial Sequence
  primer
gtaccgcttgatcgcattct

SEQ ID NO: 247 - DNA, 19 bp, Artificial Sequence
  primer
gaatatggttacaagcgca

SEQ ID NO: 248 - DNA, 70 bp, Artificial Sequence
  primer
cacgcgtgagaacgtaaaaaaagcacccatactcaggagcactctcaattgtgtaggctggagctgcttc

SEQ ID NO: 249 - DNA, 70 bp, Artificial Sequence
  primer
agccatctggctgccttagtctccccaacgtcttacggattagtggttacatgggaattagccatggtcc

SEQ ID NO: 250 - DNA, 20 bp, Artificial Sequence
  primer
atcggttactggtggaaact

SEQ ID NO: 251 - DNA, 20 bp, Artificial Sequence
  primer
gtggatgggacagtcagtaa
